United States Patent Application Publication US 2017/0009304 A1 - sequence listing, part 42

SEQ ID NO: 878476 - DNA, 99 bp, Homo sapiens
gcctattattctgctatatctgaagctaaaattaagaaacgtcaggctcctgatccgaatttggttgtgttgcttgatacaacaactgtactgggagag

SEQ ID NO: 878477 - DNA, 99 bp, Homo sapiens
ctacttcatattttggaaagcagtttttaagacaagccaggagtggtggctcacacctgtaatcccagctctgggaggccaaggccagtggattgcttg

SEQ ID NO: 878478 - DNA, 98 bp, Homo sapiens
accagtacagggagctgcagaggtacgccgaggaggttgggatcttcttcactgcctctggcatggatgaggccatgcaggacgcgttggcagacctt

SEQ ID NO: 878479 - DNA, 99 bp, Homo sapiens
tgggcatgaggagcggagcggagaatgccaaggacctaaaaaacatgggtgctaaaaatgtgtgcttgatgacagacaagaacctctccaagctccctc

SEQ ID NO: 878480 - DNA, 99 bp, Homo sapiens
cctgcttgtatagaatctcccctcattggatgtatatcagcataaggaggttttccttcagccatttctatagaagtaatgccaagggaccagatgtcg

SEQ ID NO: 878481 - DNA, 99 bp, Homo sapiens
cctgaacaagacatggaaggaaatgagggcaacttctgaagacttcaacaaggttgctgcttttgctcagaggacatccatgaccctaatggtcttttt

SEQ ID NO: 878482 - DNA, 99 bp, Homo sapiens
ggaggctggagagcctgctgcccgcccgcccgtaaaatggtcccctcggctggacagctcgccctgttcgctctgggtgctggagaatctggtaaaagc

SEQ ID NO: 878483 - DNA, 98 bp, Homo sapiens
gaagaatgaaaccggcttgttgtcttcaattaaaaaatttattaaaggaagcacacctaaggttaaaaatctgtaagagcctgattttagaattcacc

SEQ ID NO: 878484 - DNA, 99 bp, Homo sapiens
attgcaaatgcaatatcagttgtttcaagtaatggcccaggtaatcgggctggatcatcaagtagccgaagaatcttttgaagactgttgttaaaaaaa

SEQ ID NO: 878485 - DNA, 98 bp, Homo sapiens
tgctcagaacagagcagaaatcaaattgaagagagcagttgaagaagtgaagaaattattggtacctgcaggaactctaatgatccaggacaaagaag

SEQ ID NO: 878486 - DNA, 99 bp, Homo sapiens
ggaaaagtgtttggggaattggctattctttacaactgtacccggacagcgaccgtcaagacgtgacgacagcatgtacgatccctgaatgggcccgtg

SEQ ID NO: 878487 - DNA, 99 bp, Homo sapiens
ggagtttgctaaatttgaaaaggagaaaatgaatgccaaatgggacacggttcttaaagatgtgggattgaaaaaagaagatattgcaatgtgggaagt

SEQ ID NO: 878488 - DNA, 98 bp, Homo sapiens
gttcctaatgccagtaatctgcagttgcacgtgcattatttaatcacatagacaagtcaggattgaaggatagttctgtcgaagaactcaagaaaaga

SEQ ID NO: 878489 - DNA, 98 bp, Homo sapiens
gaagatgcctttgggaagcatgtcaccaacccggccttcaccaaactccctgaagctcttactcctcagaaatgtattcctcacatcatcgtccgggg

SEQ ID NO: 878490 - DNA, 99 bp, Homo sapiens
ggggcctggaccagcctcttctgaaacactgggacttaattcagtgcacaaatgagatgaatgtgaacatcccacagttggcagacagtttatttgaaa

SEQ ID NO: 878491 - DNA, 99 bp, Homo sapiens
tgcccaaacccaaagtgtggagcacttttccagccattaactccaggctctcgagaatttgaagatgttgtaaatattctccattcttcttaccttgaa

SEQ ID NO: 878492 - DNA, 99 bp, Homo sapiens
ggtgtcaaagtgtcactgaactaaaggctgactttccagacaactgcctacaccaactaatgttacaattgaatcctataacatgaaccctatcgtata

SEQ ID NO: 878493 - DNA, 99 bp, Homo sapiens
ccttgcttgaagaatgcacatactacagacttgggatctgcacctgttccaggagtagatgtaactccaacaagaggactctgcattactgaaatgttt

SEQ ID NO: 878494 - DNA, 99 bp, Homo sapiens
ggtgatttctgcatttccaactgagctctgaggaagtgctcagatctggaaaaagctattgccaccactgctctgattttcagaaattcttctgactct

SEQ ID NO: 878495 - DNA, 99 bp, Homo sapiens
agggctctgatcaagcggatccaagccatgattcccaagggatgatgcagtgtgtgattgcagtcgcggacaaagtattcgatgccttcctgaacatga

SEQ ID NO: 878496 - DNA, 99 bp, Homo sapiens
cttggattaattacatgacactcagcaaagagcttctccaggtttccatcaaagtacctttggcagcatgggagtatccctcttcttcttcttttctga

SEQ ID NO: 878497 - DNA, 99 bp, Homo sapiens
gagacctgttcttgaatacatcgatctggtctgtggtgatgatgaaaaccctagcgcctattatagtgatgccataggaaaaggatacagagtagagtt

SEQ ID NO: 878498 - DNA, 99 bp, Homo sapiens
agagcgtgaccgagagcgcgaatatcgtcatcgttagaagaaacctgtggtggcccaccagtcctaacgggacaggacagagagacagagcagccctgc

SEQ ID NO: 878499 - DNA, 99 bp, Homo sapiens
tggctctctttccatcaccgagtgcatttctgggggtttggctgctgtctcatgtatcttcaaattgcagggctcttttatttgctccagacaggtgac

SEQ ID NO: 878500 - DNA, 99 bp, Homo sapiens
tgagaagatctccattcctgaggaggagaataactgaagtgaagtgatggactccgatttggagagtagtaagacgtgaaaggaatacacttgtgttta

SEQ ID NO: 878501 - DNA, 99 bp, Homo sapiens
ggcgggctgcttgccgctatggctggcagtcaggacatattcgatgccatcgtgatggcggatgagaggtggacccaagtggagagattgtggaactgg

SEQ ID NO: 878502 - DNA, 99 bp, Homo sapiens
ctgcttctggaatgtgcagctgtcagaccacacccgctccgagcagtgctacagagacgtgtctgatctaaaggggtattccctcagcggatactacac

SEQ ID NO: 878503 - DNA, 99 bp, Homo sapiens
ctcagcccagccgtgtcactgtccccccggcttccagggaccccgctgtcagtatggaccttaagccagttatcgatgggatggatggaatcaaaatct

SEQ ID NO: 878504 - DNA, 99 bp, Homo sapiens
aactacccctggaacaagttgccggccaacgtgagacaggggagttgctgagtcagcccagaccggaaggagtggcagagatcatttgccccaagaacg

SEQ ID NO: 878505 - DNA, 99 bp, Homo sapiens
tggaagttttggaactgtctatctggtttcagacaagaaagccaaacgaggagaggaattgttatgatgtgattgctcaagcccaatctgggactggga

SEQ ID NO: 878506 - DNA, 99 bp, Homo sapiens
ttgtagagaggaggtccgcgagatcctaggggaccaggacttcttccagtggcctctctctggaacgcctacccaactccatcgcctcccgcttccgcc

SEQ ID NO: 878507 - DNA, 98 bp, Homo sapiens
tgccggagatcagtggtgtagccaggatctacaaccagagcttcttccagagccttctcaaagccacaggttcaaaccttgtactactcagctgatca

SEQ ID NO: 878508 - DNA, 98 bp, Homo sapiens
gcggcttttgtctacttggctgacctcctgatgcctcacttggatctacagcgagatattgaacaacacagcgcaggggtggagtccgtgtttaacat

SEQ ID NO: 878509 - DNA, 99 bp, Homo sapiens
tattacagttgggaaaagaagacaagcttcggatgatggagacagaaatccaaggagatgggtgttcaggattgatttccagagacttatgttacttga

SEQ ID NO: 878510 - DNA, 99 bp, Homo sapiens
cctcactttctttgtcagagtcccgctcattgtcagactccgcattggctgttgtgtaactgttatgctgtggggactggctggggcatggcaggcggc

SEQ ID NO: 878511 - DNA, 99 bp, Homo sapiens
gaaacattcactgcacagaaccgaatctgaatctgaagctgaagaaggtgactgaattttgaaactacaccctcagtaaagcaaacaggagttgtagat

SEQ ID NO: 878512 - DNA, 99 bp, Homo sapiens
ctgacctctgacgagctgcaatttggttatgaggctatcagctgtactctgaactgtagttgccaaagtttcaaacccgggaaaataaaccaccgtcag

SEQ ID NO: 878513 - DNA, 99 bp, Homo sapiens
tccagtggaatgcaccacagccatctcacatttccaagtacattctcaggtggagacctctgagaaacaatggtccaagttcattcagcaaggcaatgc

SEQ ID NO: 878514 - DNA, 100 bp, Homo sapiens
tgagccagaaatgaaggccaactgcagcgtgtcctcctggaacccaggcaccgggccggatctggcaaactctgtcaaaggctcagcatgtttctggctc

SEQ ID NO: 878515 - DNA, 99 bp, Homo sapiens
aaataaccgccttcgcatggagctggaaaccatcaaggatgttgtgttatgcacagctgggaagggcacataagacccacacggaaaccaaacacaaag

SEQ ID NO: 878516 - DNA, 99 bp, Homo sapiens
ggatttcgcaatttaagatttgtagtgactacatctgtgaaggggcctgcgatggtgtgtgcgtacagccggctgccgaaggtgaagacgtgcagctcg

SEQ ID NO: 878517 - DNA, 136 bp, Homo sapiens
tgtgcaccaatcccactcctacagcagttctcacagcaacgccagccatgcagtcatcccaaaactggctggctgaaaatttagtccgcaaggcaagagtagcacggtcagagatgagacgggcgtggctggcgtt

SEQ ID NO: 878518 - DNA, 99 bp, Homo sapiens
ggcgaccaactccatggcttctgataaccaggctgtctctattttgggagatgaagtctttaggttccaactgactctttatccagatgccacagaagg

SEQ ID NO: 878519 - DNA, 99 bp, Homo sapiens
tcgacttggtcccgtcagccggaccccacctggacggctggggccacttgtggtcgccgggagacaatgactgatgtggtgggtaacccagaggaggag

SEQ ID NO: 878520 - DNA, 99 bp, Homo sapiens
ggatcgtggcctctcgagagcaaggcacctgaatggacagaagaggacctcagccaactgacaagaagtatggttaagttcccaggagggactccaggt

SEQ ID NO: 878521 - DNA, 99 bp, Homo sapiens
gaaagagaaacgcacttcatcttcatccctccggagaaaaagaatgtgaaattgactaaatacatggaaaatgtttataggaggccttagctgggacac

SEQ ID NO: 878522 - DNA, 99 bp, Homo sapiens
ctatagccaaaattcccagagcaaagaagaaatatgtgacaagagtatgtggccttgcaacttttgatgaggacggggacttggttgccttttccagtg

SEQ ID NO: 878523 - DNA, 99 bp, Homo sapiens
aaagatctaaagtcacccggcggccaaaggccagtgactaccaacgtttggaccagaaggctcttgtcaggatggtgaagctgttcatcggaaacctgc

SEQ ID NO: 878524 - DNA, 99 bp, Homo sapiens
ctcatctaaagtcatctcttgaacttgggtttcttcttctacctccaactcaggaactcttgctcttctcaaagctgttccaaatctcccactgtccca

SEQ ID NO: 878525 - DNA, 99 bp, Homo sapiens
attgatgctgccaaacatgcccataagttttgtaacacagaagatgaggagactatgtatctgcggagttgtgttggtgttgaagaggagaaggctgct

SEQ ID NO: 878526 - DNA, 99 bp, Homo sapiens
ctctcaatacataaagaacagcgtaactccagacatggtcagatggcaaaaatcaagcaaacccttctagacagccggggagtgttcctcgacatgttt

SEQ ID NO: 878527 - DNA, 99 bp, Homo sapiens
ctgaacggagtgtgcgacggattgggagaaatgaaagctcattagcatctacactgaagacgctcctgttcttcacagctttaatgatcactgttccta

SEQ ID NO: 878528 - DNA, 121 bp, Homo sapiens
catttttcttctctgggaaggtgaacatttgtagcattgatttcccggataagggcacgcacggcaagatgtcatcttttgccatgttaccagatccgggaaatcaatgctacaaatgttc

SEQ ID NO: 878529 - DNA, 98 bp, Homo sapiens
ttcagagcgtcacggcgtacgccctcatggggaaaatctccccggtgactttcagtctgttcaaaatagtcatttcaaggaacctctggtgtcagatg

SEQ ID NO: 878530 - DNA, 135 bp, Homo sapiens
ggcaatctgaagagatacctgaagtctgaacctatcccagagagcaatgatgggcctgtgaaggtaccgctagagcgacatgatggtggaatctgcctcggagacaatcaggtcggctccatctggtcagaatgg

SEQ ID NO: 878531 - DNA, 99 bp, Homo sapiens
catggagctgctgatcaacgacaaggccttctggcggccgcccctggtttctcctggggggtgatgagcgggagcggctctgggccgagctactgcgca

SEQ ID NO: 878532 - DNA, 99 bp, Homo sapiens
cgactatggctatgtctgcgtggagttttcactcttggaagatgccatcggatgcatggaggccaaccagcattgttggaaactgttactacattttta

SEQ ID NO: 878533 - DNA, 99 bp, Homo sapiens
aaagaaccctggctggggaaaagggaagtgaaaagagatctgttttcagactctgaagaagaagctatggagactacaccagccaaaggaaagaaagct

SEQ ID NO: 878534 - DNA, 99 bp, Homo sapiens
ccccactaacggggacttcacctttgtctcctcagcagacgcggaaggagtgaaaaggctctcagtgtctgagttaaatgaaatcctggaagaaattga

SEQ ID NO: 878535 - DNA, 99 bp, Homo sapiens
ccgtgatctcaaactcccccatgattcgagccagctcctcgctccgttgctggtctggtccactgaagccagccagctgcgtgatcatcaggcacacga

SEQ ID NO: 878536 - DNA, 99 bp, Homo sapiens
cgatcatcgagctaaaatatcgtgttgatttggtgcttccagatgtgagttatcaggtggaatccagtgaggaggatcagtctcagactatggatcctc

SEQ ID NO: 878537 - DNA, 99 bp, Homo sapiens
ggctatctttccacagaactttcccctaaaatgtccattttcattttctccatcgaagacttccacgtagtcatacttgggaggctgaggtgggaggat

SEQ ID NO: 878538 - DNA, 99 bp, Homo sapiens
cagccctgaggagccggaccgatgtggaaactgctgcccgccgcgggcccggcaggaggagtcggatggtcagggctgccctttctgtcgttgtgaaat

SEQ ID NO: 878539 - DNA, 99 bp, Homo sapiens
ctttttctacttctttctgggactccctagaccaaatccaaccccagtgccgattgagctcatcgtgctaaacccaaagggacgcgtagggattccagg

SEQ ID NO: 878540 - DNA, 99 bp, Homo sapiens
gaagatggcggccggcgaaaggagctggtgcctgtgcaagttgttgaggattgtcaccagacctgcaatctatggagcagattcggagaattatgagac

SEQ ID NO: 878541 - DNA, 99 bp, Homo sapiens
ttcttcaaacgctaaatcaagcttggaatgatcatcaaacagctatggtgatgattagagacatactaatgtacatgctcaccaagatggaggaacaga

SEQ ID NO: 878542 - DNA, 99 bp, Homo sapiens
gaaatgtgtcatcgaaagccagttggtagctggcagtgttgtgatggcttttgaagaagtatgcccggacagaatagatctgattcataaaaattaccg

SEQ ID NO: 878543 - DNA, 129 bp, Homo sapiens
gtccccgctcctcccagggccttctaacgatgacgatattcgcgctctcggtcacgctcaatatcgtcatcgttagaaggccctgggaggagcggggacactgaggacctctctccaaattggcctctc

SEQ ID NO: 878544 - DNA, 99 bp, Homo sapiens
ctatttgtgtcttggcatccagcagcggatgcagtggtgcagtatgacgtggagctgattgcactaatccgagccaactactggctaaagctggtgaag

SEQ ID NO: 878545 - DNA, 99 bp, Homo sapiens
gggatgccggcagtcagagtcaaaacagagcttttggaatctgaacaaggggaacaaactctagccctcaggaaagaagggattggagttgttttggat

SEQ ID NO: 878546 - DNA, 99 bp, Homo sapiens
cacacagacactgtcactggagtggccttcaacccatcagcgccccagctcctagagtggcctcagctaggtaaccaacgggagtcgacttatctatgc

SEQ ID NO: 878547 - DNA, 99 bp, Homo sapiens
gcttgcctacacttcaaagcacgtctagcactaatgctcctccggatgatgatgatcgaagctaaaccagccccagaaatatttgaaaatgaagtcatg

SEQ ID NO: 878548 - DNA, 98 bp, Homo sapiens
gcagacagtggggaggaagaatgccggtcacagcccaggaggtcacaaggcacttaaagcattgttgaggtcattggtaggtcttcaggaagagttgc

SEQ ID NO: 878549 - DNA, 99 bp, Homo sapiens
tgctggggcagcacgatgtgattatttcaggtatgctgctgaaagtgggaatcctctacattggtgggcagctggtgaccagtggggctgtaagcagtg

SEQ ID NO: 878550 - DNA, 99 bp, Homo sapiens
ctccagtgtcattggctggactcaaaccacactgacgttacaacagttaagggcttcattgaagtcctcctcagttaaattaacattcaaacatttcaa

SEQ ID NO: 878551 - DNA, 99 bp, Homo sapiens
agagattcgggttctgccgcttatcttcaggagcgaagagctgcttctgtatcttaaggtagttttgcagaagtgcaaagtcaagtctctcttgcacag

SEQ ID NO: 878552 - DNA, 100 bp, Homo sapiens
gacccccggaatccgcacaatggtcttaggttctccaggatctttgggaagcggctatccttggagagcacaaagcggtcattgtgcggattccgggggt

SEQ ID NO: 878553 - DNA, 98 bp, Homo sapiens
accggacgctgctcgctcatctgcctctgcgcgctgcagttggcatttattaatacagcaaaagaaatttatgaaaaaattcaagaaggagtctttga

SEQ ID NO: 878554 - DNA, 99 bp, Homo sapiens
ggccgtggaagcggccaccgactactgtcagcagctgtgccagaatttccagatgatgttaatccagtgaccaaagaaaaaggtggacccaggggccca

SEQ ID NO: 878555 - DNA, 99 bp, Homo sapiens
cacaggcctgctgaactgggtgctttatataggcaactccgatccaatatccgagaaattgagaaactttgtttgaaagtccgaaaggatgacctagta

SEQ ID NO: 878556 - DNA, 99 bp, Homo sapiens
ctggaagcgccttagaggagccatttttccaggcagccggtgaaggttgtgtactcctccaaggatcctgcccagccgaaagagagttccaaggtggat

SEQ ID NO: 878557 - DNA, 99 bp, Homo sapiens
ggaggccgtccagcagatggcggatgccctgcagtacctgcagaaggtctctggagacatcttcagcagaatgatggtcgactgaggttgagccgtcag

SEQ ID NO: 878558 - DNA, 99 bp, Homo sapiens
cgagactctccttgcttggaattctgcccactctgcggagttagcagtcacgacctccagcacagatatttgatcctgatgacctttattcaggggtca

SEQ ID NO: 878559 - DNA, 99 bp, Homo sapiens
gtttctttcttaaaggactgatttttagaactccacatttgagctgaggaggatgaggacaaggaagatgatttccgagctcccctttacaaaacagtg

SEQ ID NO: 878560 - DNA, 99 bp, Homo sapiens
ccacggggtgctgcagatcctgttccagccaaaacagagtggagtacgagaaaagggtccgagcacaagccaagaagtttgcgccctcataagcagcga

SEQ ID NO: 878561 - DNA, 98 bp, Homo sapiens
cctgtccctcacatccgatgcaccctttttgtcagattatcaggatgagggtattgaattgaaacacctttgtttggaatacatgactccatggctgt

SEQ ID NO: 878562 - DNA, 99 bp, Homo sapiens
tggcatactctgcatgattgggcttcatcaggaaaagcatcttcattttccccgtttgttcacacaaatcgatggtgtcgaaaagttcccgtggtattc

SEQ ID NO: 878563 - DNA, 98 bp, Homo sapiens
gacgatgcaccagtgatctacgggctggagttccagatgccttcaattaagttgcagagttctgatggagagatatttgaagttgatgtggaaattgc

SEQ ID NO: 878564 - DNA, 99 bp, Homo sapiens
ggctctgaaggcgaacgcttcgctggccatttaggagctctgctcaaagccagacgggagcatgataaagatccagaaagcttttttaaggtattaatg

SEQ ID NO: 878565 - DNA, 99 bp, Homo sapiens
gtgtcccaccgcaaggactggagaagggtcaccatcagaaaagctaagtttgctgtatagtgaggatcaggagatctgatcctgattgcagaaccttcc

SEQ ID NO: 878566 - DNA, 99 bp, Homo sapiens
tcctggaggtgaaactgggcaagaggccccagcccgtgaaaagtgaggagctggatggcctgttggaaatcaaccgcatgacccacaagctgctgagcc

SEQ ID NO: 878567 - DNA, 99 bp, Homo sapiens
tcttcagaggacagtggatggcatgcagcaagagggtactccatatacaggaggttgttcataaggagcttactaactgtggtttgcaccctaacactc

SEQ ID NO: 878568 - DNA, 99 bp, Homo sapiens
atgtctgccgaaatgttcaagtttaccaaaagagaggcaccgctggaacactaatgaggaaggtgggagtcaatcattttgacaagtctcctgaaagga

SEQ ID NO: 878569 - DNA, 99 bp, Homo sapiens
tggacatctgtagctgtcgtttggtttgatcttgttgactatgaggaagttctaggtcccctcttgctgttggctgcacatcaggaaggctgtgatggg

SEQ ID NO: 878570 - DNA, 99 bp, Homo sapiens
attgagcctcaaaatgaagatggcacatggcccaggcagaccttgcagtcaaagttacagaatacctatatgctaataaaatggctttccgatacccag

SEQ ID NO: 878571 - DNA, 99 bp, Homo sapiens
ctaagagaaagttagcaggtgccaatccagcagtcattacttgaattatatccagatcgagagacagaagattctgaaagggttcaatgaaatgagagt

SEQ ID NO: 878572 - DNA, 99 bp, Homo sapiens
ccaagatccggaagggaaagcctcagcagcttctcagagtggacgagcacgacttcagcatgagacccgccttcggagacattggtgaagactgaggaa

SEQ ID NO: 878573 - DNA, 99 bp, Homo sapiens
tcgttgatcgaaatcctcagttccttggatcgacgagaacgtgctaggagcccagctggacgttgaggccgcccattcagagatcctcaagtacttcca

SEQ ID NO: 878574 - DNA, 99 bp, Homo sapiens
ggataaacatggcacaaatccagcagggaggtccagatgaaaaagaaaagactaccgcactgaaagtctagagcatgtttggaaaggattcaagaatta

SEQ ID NO: 878575 - DNA, 98 bp, Homo sapiens
ctcacccaccaactgttcccatgggggtctgtctccaaggtgttctttgacctaatgagagaaatcagaacaaagaagatgtcagaaaacaaagacaa

SEQ ID NO: 878576 - DNA, 117 bp, Homo sapiens
ctccgctgtacccaaagaaagctctgcaggtgttttctgggagcttcgaaggtgactctgctaatctaacctgcagagctttctttgggtacagcggagatgtcagtcctttaattt

SEQ ID NO: 878577 - DNA, 99 bp, Homo sapiens
tggaaactattcttagctccgtcactgactccaagttcatcccctctgtctttcagtttggaattggcagagggggtcgatttgggaggaaaggtgtgg

SEQ ID NO: 878578 - DNA, 99 bp, Homo sapiens
acgtggcagcaagcgggagtcggggatagtgtcatcggttcggtctctaattaacagaagatggcaaagcccagccacagcagctatgtccttcagcag

SEQ ID NO: 878579 - DNA, 99 bp, Homo sapiens
caaagccagtcatgatatttatttaatttgtggtcttcagggtgcaccttggttagagaggatgggctggggcagggaggcagatgcgggagccacagt

SEQ ID NO: 878580 - DNA, 99 bp, Homo sapiens
tgaagaaggaaaaagcggaagaaaacatgaagatggcggtggagataagaatatgctgtgatagcatttggatgtgccagctgtccaaaattaacttgt

SEQ ID NO: 878581 - DNA, 99 bp, Homo sapiens
ctcagccctgtggctgggggcagagctcagatgggagacctttaactctgaaggacatatgggaaggagttcatgagtgctataagatgcgactgctac

SEQ ID NO: 878582 - DNA, 99 bp, Homo sapiens
ctggacgctcatcagagggaagatctttttcctcaattggatgtcttccatttggaagcccctttgcttctaagaagttccagagaccatcccaggccc

SEQ ID NO: 878583 - DNA, 99 bp, Homo sapiens
ggagggcgagcggacctccctggagaagtagaatcctgcttatctgtgaaatgcagttaacacatcagctggacctatttcccgaatgcagggtaaccc

SEQ ID NO: 878584 - DNA, 99 bp, Homo sapiens
gcaggctgggcacgaggaccatgctgggccggagcctccgagaagttatcaatactctggctgaccatcatcatcgtgggactgactttggtggaagtc

SEQ ID NO: 878585 - DNA, 99 bp, Homo sapiens
tagctgggattacaggcaccccccaccacgtccagaagccccatgtgccactcccctgatctgcagcttcggtaggccggtggacctggagaaggacga

SEQ ID NO: 878586 - DNA, 99 bp, Homo sapiens
atccttcaaaattaaaagaggagcagcatggcatttcagtcactggtttgcagagtccaggcagcggaggaggagaaagagatggacctcccggactcg

SEQ ID NO: 878587 - DNA, 98 bp, Homo sapiens
gaaatagcttgtgctgctgctgctgctgctgctgcatgtctaccaggagaggagggaactgcggagcgggtttttcgttggaatatacgttgcacatt

SEQ ID NO: 878588 - DNA, 99 bp, Homo sapiens
ctactgatgaggagaaactggcatccacgtcatgtggtcagaaatcagctggtgccgaggtgaaagataacgaaggaggcccaacttcattcaataagg

SEQ ID NO: 878589 - DNA, 99 bp, Homo sapiens
gttcatgaaacctgggaaggtggtgcttgtcctggctggacgctactccggacgcaaagctgtcatcgtgaagggcaagatcacctgttgcctgaagca

SEQ ID NO: 878590 - DNA, 99 bp, Homo sapiens
tgacatcttctctcccatggatatacatgccttcagccaacagaggcagccaaatgatatcatgtttaggtattactacaaatgaaagaatgaatgcca

SEQ ID NO: 878591 - DNA, 99 bp, Homo sapiens
tttgtgagtacatagtaaagaaaattccagtacccccaagagactttacttcagagccccggcttattggtttactcctggcttgggggcattaggaag

SEQ ID NO: 878592 - DNA, 99 bp, Homo sapiens
tactttactctgcatgtagtaggcaatcttagttattaaatagagcatctgttgagggactcttttaaaaccacagccatgaacagacgttggggctaa

SEQ ID NO: 878593 - DNA, 98 bp, Homo sapiens
ccaggtgtaagcgcagaaagcaggcgaacccgcggcgcaataacggtgccagcaaggtcaacctcgtgaagatcgcgtccacggcctccagcccacgg

SEQ ID NO: 878594 - DNA, 99 bp, Homo sapiens
ttggagtagtccttggctgcaataatttccggttatttggaaatagcggtgcttgcagcgcttgcggacagtcgattcctgcgagtgaactcgtcatga

SEQ ID NO: 878595 - DNA, 99 bp, Homo sapiens
aggacttgagtaacagcaacatggtagctacagcaagctgggtagcaggcagatccaaaggatatcatgaagtttccagggcctttggaaaaccagaga

SEQ ID NO: 878596 - DNA, 98 bp, Homo sapiens
ggggatagcctctcttactaccactcacccgcagactccttctccagcatgggctcgcctgtcaacgcgcaggtctcggcgcggaagatggccggcgg

SEQ ID NO: 878597 - DNA, 99 bp, Homo sapiens
gataactttgattcaccctatgacaaagatggattgataaacttcttgcggaataaacacaaaattcacgtccaaggaaccgatcttcctgacccaatt

SEQ ID NO: 878598 - DNA, 98 bp, Homo sapiens
tcccagggccaggcgccgctcagaacgattgactacttcaacaatcagatcattgttgacctcgtggagcaacagcacaaagggatcattgcaatcct

SEQ ID NO: 878599 - DNA, 99 bp, Homo sapiens
ccaccgtgctggccccccgcttgccgcagccgcctcagaacccgaccaacatccagaacttccagctgcccccaggtattgttgcagcatctggcagtg

SEQ ID NO: 878600 - DNA, 99 bp, Homo sapiens
cctgggtgacagagcaagaccctggtacagaatccattttcccggaaattcccgaggggtactgccacactctgtctgggaaactctggtctaactata

SEQ ID NO: 878601 - DNA, 98 bp, Homo sapiens
aagcccgctcctccacaaaccgagcaagtagagagcaagaggaagtcagggggaaatgaggttcgagaacttgtcttggacaattgcaaatcaaatga

SEQ ID NO: 878602 - DNA, 98 bp, Homo sapiens
ctggctaaggaaaccctattacctccagggacagcttaatgaagacaaactgaaggggaaactgagatccttagaaaaccagctatacacctgtaccc

SEQ ID NO: 878603 - DNA, 99 bp, Homo sapiens
tgtggagagctcagcggagccaggcaaagcccccaagcacgctgggcagaagaaaacctaccgagcggtttctactttccaggtccactggtgtttggt

SEQ ID NO: 878604 - DNA, 100 bp, Homo sapiens
gcctcccaaagtgctaggattacagtgggcatccccaccatcagatggtgcggggcagagggggactacaacgtcatggtgatggagctgctggggccaa

SEQ ID NO: 878605 - DNA, 99 bp, Homo sapiens
ggataggcttaggaattttgtcttctgttgggcttggaacagggctgcacacctttctgctttatctggttgtttttagaggtaatacacctagtttgt

SEQ ID NO: 878606 - DNA, 99 bp, Homo sapiens
gaagagcttttgaagctggatggggttttgccctcaccaaaactttctctcttgataagacatctcgtggggaatttgactccagtgaatttgaagtta

SEQ ID NO: 878607 - DNA, 98 bp, Homo sapiens
ccctcatggggaaaatctccccggtgactttcagatgaatcggacaaagggtgatgaggaggagtattggaacagctccaagttcaaggcttttacct

SEQ ID NO: 878608 - DNA, 99 bp, Homo sapiens
gctagttaggattttattactggcagcatgtatatcttttgatgttcgacagcgtcacagatatctctctcacttgccactcacctgtgagttcagcat

SEQ ID NO: 878609 - DNA, 98 bp, Homo sapiens
tcagatcttcacagcacagttcctgggaaggtggagccaccagcctctccttgttttccaagagataacttcaccaagatgtccagtgataggcaaag

SEQ ID NO: 878610 - DNA, 99 bp, Homo sapiens
gaaagaatttgagcctctgctgaattggatgaaagataaagcccttaaggacaaggcaacagagatgcttatttttggaaagaagttaacagcgggaga

SEQ ID NO: 878611 - DNA, 99 bp, Homo sapiens
ccaatttctcctgcaaaccagggtatcagagttactccacaggatccgctgaacataggatgttgccacaaaatctacctcgtgtatttttctctttca

SEQ ID NO: 878612 - DNA, 99 bp, Homo sapiens
ctggtgcccagccgggaactccccatcgcgttttgccagcgataatacgcctcagaattaaacaaccaccatgtcgagcaaaaaggcaaagaccaagac

SEQ ID NO: 878613 - DNA, 98 bp, Homo sapiens
cttgccctgtctcctcgcagatgagctattgacctgaaaagtggttctggaaaagtgtaccaaggccctgcaaaaggtgctgctgatacaacaatcat

SEQ ID NO: 878614 - DNA, 99 bp, Homo sapiens
ttccataaagaatggcccttgtggataagcacaaagtcaagagacagcgattggacagaatttgtgaagcagatataatttctacagtagaatttaatc

SEQ ID NO: 878615 - DNA, 99 bp, Homo sapiens
ccgggagttacaccgccaccgccagggaaacctcaaatgaattctgaaggggagataccttccctgccatcaggcagccaatctgcaaaaccagtaagc

SEQ ID NO: 878616 - DNA, 98 bp, Homo sapiens
gacctgatgcccagagtcaaggtacaatcagttgaaactgttgaagggtgtacacatgagaacggccggtttgtgggcgatgctgaccttgaaagaca

SEQ ID NO: 878617 - DNA, 138 bp, Homo sapiens
accaaccgggacaccctggctgtcatccgccacttccgcgagcccatccgtctcaagactgtgaaaccagatgccatctacgactgctcttccctctaccagaagaactaccgcatctctggagtgtataagcttcct

SEQ ID NO: 878618 - DNA, 99 bp, Homo sapiens
ctccgaaagtgctggaattacagtgctgacggggcccttggtgtgagtatcagtgcgccaggaggagccattgcttctgttcctaactggacactgaga

SEQ ID NO: 878619 - DNA, 99 bp, Homo sapiens
gacatggcgaaaccccgtctctcgctttcttgagtaaagtcaagggcgtcttctcctgatgccagcagtgtgtgcagaattcgctgtttcacttgctcc

SEQ ID NO: 878620 - DNA, 98 bp, Homo sapiens
ggaggcagtagccaaacacccagcatttttgaaacgttggggttgttggagtggttggattttccctggaattgagtgagaaattcagaagactgaag

SEQ ID NO: 878621 - DNA, 99 bp, Homo sapiens
gcattatccaacggctgctggaaggtagacgttacatccaagaggaaataatccaggcaaggaagcacaagctgatcaagatgtgtagttctgtggctg

SEQ ID NO: 878622 - DNA, 99 bp, Homo sapiens
ccagactaggaatgccagcatctgccaagcagacatggatttgattgacatactttggaggcaagatatagatcttggagtaagtcgagaagtatttga

SEQ ID NO: 878623 - DNA, 131 bp, Homo sapiens
gcgggtattggatgattggtagctaagactcccgaatttccacgtaggtgtctaagcccacgaagcctgcggagatgtccacggtggcaatgttgttggagttgcccatttccccacttctgaagtattcg

SEQ ID NO: 878624 - DNA, 99 bp, Homo sapiens
caagctcaaggccgggggttctgtagaaagtcttcgcagttctctcagtgggcagagctccatgagcaagaattgtcagacagtattggctccctgttc

SEQ ID NO: 878625 - DNA, 98 bp, Homo sapiens
gtccagccctctccagtgtatccacagccccgacctttgatgagaactcagctgtccagatgggtgatctacaatgaccagaaagtgtgtgcctccga

SEQ ID NO: 878626 - DNA, 99 bp, Homo sapiens
agcgcatcttcaacccctgacagcactcgctctgctcgcagtggacgaagtagagtcctagaggcactgaggccaacagagcacttatggcaaggcatc

SEQ ID NO: 878627 - DNA, 99 bp, Homo sapiens
agagacaaaaaacaaatcagagagccagtagacttacagaaaaagaagaagcggaaacaacgttctcccgcaaaaatgatgaagaacgagagcttcaaa

SEQ ID NO: 878628 - DNA, 99 bp, Homo sapiens
aggaaccttcattaacagatgccattccctctcacccaagaggcagaaaccactaatactagcctcttgcaggtgcaactggaatgcagtttacataat

SEQ ID NO: 878629 - DNA, 99 bp, Homo sapiens
ttgaccttctgccatgattgtgaggcctccccagccacgtgaaacttctcagaccagtatccttcaggggttctcttactctgatttgcggaaatttgg

SEQ ID NO: 878630 - DNA, 98 bp, Homo sapiens
cagtacgctgggtcggaccaggtctcttcccatcactattgaaatgctaaaagttgaacagcagagaatttcaaaggaccttgctaatatctgtaaga

SEQ ID NO: 878631 - DNA, 99 bp, Homo sapiens
ccagaggtttggctctcccatcatcatcttgaatttagtgaagctctccacacaaggagatgcaagtcaggtgattgggcctcttactgaaggacagag

SEQ ID NO: 878632 - DNA, 99 bp, Homo sapiens
acaagtcaggtccggcacatgtttccgcggagcggacccagcaatgacgaccatacccttttgtgttattctactctaaatttcatgggctagaaatgt

SEQ ID NO: 878633 - DNA, 99 bp, Homo sapiens
acaatatctgtgtcgttcttggcagaaattatattttccagcccgtgtctgcaggtctataatgacggatctatactacctcagtcagacagatggagc

SEQ ID NO: 878634 - DNA, 98 bp, Homo sapiens
tcagacctgccaatttaccagagataattgataacaccctgtaacagctgagtgaaaggtgtagcagtcactcggcctacacccacagcatcgacctt

SEQ ID NO: 878635 - DNA, 98 bp, Homo sapiens
acattagaggtcatccaaagcagccgtcccctctgcagcctctctgacaagtgtactatactggcaattgctggagaagattttgcaattgttgcttc

SEQ ID NO: 878636 - DNA, 99 bp, Homo sapiens
tcagttcccttctgatgctcctctagaagaggcaaggcagtttgctgcacagtaaagcccaatctgcaggtgttgcgagcccgattctctgagatcaca

SEQ ID NO: 878637 - DNA, 99 bp, Homo sapiens
cattagtagcagatgaaactgaggggcaacccccttcatttatctcgtgagcggtatcggaagctccatttggtctggcaacaacactgcattatagaa

SEQ ID NO: 878638 - DNA, 99 bp, Homo sapiens
ggagcgccctgtaaggtatattcggaaacctatcgattacacagttctggatgatgtgggccatggtgtcaagcttgaagctcaactagagaaaaagga

SEQ ID NO: 878639 - DNA, 99 bp, Homo sapiens
cttggagtccggacatctgaaacttggcatcagaacacaccatgatggctgtgacctaagaccctcaggaagccccggggtcatggcccagaagcaccc

SEQ ID NO: 878640 - DNA, 98 bp, Homo sapiens
atcctcaatttaagcctgatctaacccctagaaacaggaaacagagcaaatgcagcgttacaatcaaagacttattgaggaattgaaaaacagacaga

SEQ ID NO: 878641 - DNA, 98 bp, Homo sapiens
atctagcttgataataggaccatccaaagaaaggaagttttcatgggctgagctgctgagttcagcctgggaactgaggccaacaagggagtctcctc

SEQ ID NO: 878642 - DNA, 98 bp, Homo sapiens
tccgggggctccggaccctcggcgcagagacttatttttgagctcgctgtaagactgagaaatcacgtagtccttcctgaaaccactaagaggaaaaa

SEQ ID NO: 878643 - DNA, 99 bp, Homo sapiens
gccgaaatagtaaacttgaggtataccatcatatccaggaatgccttctaaagggaaaattattcacgtgcatcatgttcgcagatcttctgtcattaa

SEQ ID NO: 878644 - DNA, 99 bp, Homo sapiens
gcatttaacaaggcggtgtggtttactccatgcagttgtcaggagttgactggtctgagtgtctccaatggaaaggaccaacttgtagtgttccatacg

SEQ ID NO: 878645 - DNA, 98 bp, Homo sapiens
atttgattcagcaaatgggatcaatatttcacctgatgataagattcacaatttgattccacaactggatttctaggtaaaactatgggcaaactgaa

SEQ ID NO: 878646 - DNA, 99 bp, Homo sapiens
gtggctggtgggggccggccccggcctggtcctggccccggagctgttgctggacccctggcagggagagattaaacagattctagaaaatgaacttca

SEQ ID NO: 878647 - DNA, 99 bp, Homo sapiens
caacaagattcagaagaactgttgaaactagcaacatctataagtgaaaccttggaagagaagaaacctgctaatattttagttatgggtgaaggtcct

SEQ ID NO: 878648 - DNA, 99 bp, Homo sapiens
tcattggttacaactgagtcccaccgatgcttcaaatttaacaggcaggaaactgcatatcttctggtttacatgaagatggagtgctaatggaaatgc

SEQ ID NO: 878649 - DNA, 98 bp, Homo sapiens
agcatggagaggggccgtggcccctgcagcggaaccggacccagtccctgagccgcccctacacccacaggtatgtgaaatatggctcaggcccagct

SEQ ID NO: 878650 - DNA, 133 bp, Homo sapiens
ctgacatggcttccagaatcactgagctgtaacaaagcactctgtgctagtgatgtgagcaaatgcctcattcaggagtgtgaaaccaagattgcacaagagatagccagtctttcaaaagaggatgtttcca

SEQ ID NO: 878651 - DNA, 99 bp, Homo sapiens
tgggaacacatcaggccgtctctgtttgaacaactgtgatgcagatccatccgccctagcaaaatatgttctggctttggtaaagaaagacaaaagtga

SEQ ID NO: 878652 - DNA, 99 bp, Homo sapiens
ctgccggctgccctgtgaatgggaagttacgcgaagtccacccagcgtttctgaggtcatcatcagatttgaaatatttaaagtggatacaaaactatt

SEQ ID NO: 878653 - DNA, 99 bp, Homo sapiens
ctgcagttacagagtgctgccatcaccaagtatgtggcggacgtcctgccggggaagaatcaaagagcagtgagctccaaacgagaatggaagccgctg

SEQ ID NO: 878654 - DNA, 103 bp, Homo sapiens
ggacttgaggactttatcagccatcagcatcacttctccccatccttgcagctgttcttccagacttgcagtctctgcagcctgttcagcaactgacatcctc

SEQ ID NO: 878655 - DNA, 99 bp, Homo sapiens
gactctgcgtcaggtcacccagcagagatcagcaatccttggctcactgaggaggtttggtcttgggcgtctttggtactggcttttttaggggtctgc

SEQ ID NO: 878656 - DNA, 99 bp, Homo sapiens
ctgggcaacagagcaagaccctgctgcagtccttcagtcccataggtaaccctcatttcttccagctctctgtttagctcttcaatctcatgctgcttc

SEQ ID NO: 878657 - DNA, 99 bp, Homo sapiens
gtataggtgagggacttgatcaggctctgccctgtctgacagaactcattctcaccaataatagtctcgtggaactgactgcagcgaggcaagaaacaa

SEQ ID NO: 878658 - DNA, 99 bp, Homo sapiens
ggcaacatggtgagatcccgtctctgttcaaagccgggctcattgtgataggggttctcagtcatcagggactggatagagatgagcactgaggagatg

SEQ ID NO: 878659 - DNA, 99 bp, Homo sapiens
accagcctgaaatgatcttgaaggaagccattgaaaaccatcagaacatgattaagcagtttaaagtggttagcaggaagaagatgagccttaagtctg

SEQ ID NO: 878660 - DNA, 98 bp, Homo sapiens
ggcgctgacgccgcggacctccctgcgaccgtcgcggaccatgggcgacaaagggacccgactgtccaagtgattgtccaggctcggcttggtgaaaa

SEQ ID NO: 878661 - DNA, 98 bp, Homo sapiens
gtcataggggttccacagtcttttcagaaactcatatttaaggttgtatatgaacacagatcaagattagagaaatccttgcaaaaagaaagacttga

SEQ ID NO: 878662 - DNA, 100 bp, Homo sapiens
acatcgtccacatccttaacaagatggctggaacttggggagctgcccgtatagctggaaaatggcctccttggccatcttgttaaggatgtggacgatg

SEQ ID NO: 878663 - DNA, 99 bp, Homo sapiens
agcagttttcatcatctaagtgaaaggtggatctccttacgtagcagccaaaataaatgaagcaaaagacttgctagaaacaaccaccaaacattgatg

SEQ ID NO: 878664 - DNA, 99 bp, Homo sapiens
tcagataacttctgtgaagctgatgtggctgacaagattttgaaaaagaaagaataccctctttatataaatcaaacctgccatagagttactgtttct

SEQ ID NO: 878665 - DNA, 99 bp, Homo sapiens
gacactggctggattgaggagtagaaggctcaaacaacccaaggaatacgagacgttctatggtgaacacagcctgctagtccagcaggccgagtcttg

SEQ ID NO: 878666 - DNA, 99 bp, Homo sapiens
gatggtggatcattgctctttgaattccagtcccgtcggctggactctattacctggcagaactgatagaagaatacacagtggccaccagcaggatca

SEQ ID NO: 878667 - DNA, 99 bp, Homo sapiens
gtttcgaatggtgctggagccatggaagcaaggaagctgagaacctgggcctcggctagcatgacgtcttggatgatggggagtccacggggctcgcca

SEQ ID NO: 878668 - DNA, 99 bp, Homo sapiens
gcgggaccatgttcaccagcaccggctccagtgggctctttgtcgagatgtccacagaaggaggatttggtggtactagcagcagtgatgcccagcaaa

SEQ ID NO: 878669 - DNA, 98 bp, Homo sapiens
cctcagcctcccgagaagctgggattacagagatttacaaacgaggaccacctggcagttcataaacacaagcatgagatgacattgaaatttggccc

SEQ ID NO: 878670 - DNA, 99 bp, Homo sapiens
cggaaaactcccaacttcctggcaaaagaatggaccccagcaggaaaagcaaagcaagagaattctgctaagaagttttattctgaatctgaggaagag

SEQ ID NO: 878671 - DNA, 99 bp, Homo sapiens
ttgaggacacttgtggagagctcgaattccagaatgatgaaattgtgtttgggaagtagctgctccatacattgaaaaatacagaatggagcatattcc

SEQ ID NO: 878672 - DNA, 98 bp, Homo sapiens
aggaggtgccgcgcggctcggagccctggaagcagcagctcaccgaggacggggactcgtatgctccagaatcactgacagagagcaagttttctgtg

SEQ ID NO: 878673 - DNA, 99 bp, Homo sapiens
ggaggacaatgaggaggaagatgacgctggtgtggaggatgcggcagatgctaataacggagcccaggtttatagaaggatcatttgaagaatatttaa

SEQ ID NO: 878674 - DNA, 99 bp, Homo sapiens
agcaattagaagttgtccaacaggtggtactttatgctagaacccagcgcaggagtaaattgaaagaatcacttgaaaaagctgttggctggacctgtg

SEQ ID NO: 878675 - DNA, 99 bp, Homo sapiens
caaggtgatgcttttgctacgacctcattttctgctggaactgggccgcgatgggcctcttggaacattggtgtgttcatctgcattcgatgtgctgga

SEQ ID NO: 878676 - DNA, 105 bp, Homo sapiens
tggccttcaaccccgagccgctggtgctacaggacatagctcgccttttgcaagaaaaggagttacaggaagagaaaaagagaaagaaacactttccagagttcc

SEQ ID NO: 878677 - DNA, 98 bp, Homo sapiens
ctcctgcttccctggctcatgttgctcacagaaagtttcctacactactgaggtttaggggcactgtgaagcaaaagccacgcctcagaatcccaggc

SEQ ID NO: 878678 - DNA, 99 bp, Homo sapiens
gcctcctgagtagctgggattacaggtccacgccaccctggagctgtttgccctgatggtggtagtgtttgaactctgcatgaagttacgctggctggg

SEQ ID NO: 878679 - DNA, 99 bp, Homo sapiens
gttcttggtctcactgacttcaagaatgaagccgcggaccctcgcaccagagactgctgctactttgaaacgtacgatagaggccctgatggacagagg

SEQ ID NO: 878680 - DNA, 99 bp, Homo sapiens
actcatgtccctgcagctacaggaggttacaactgatggaaaaccaaaaatcgttgatatcattgatacaacaggaagtggcgatgtgaatactgctac

SEQ ID NO: 878681 - DNA, 98 bp, Homo sapiens
gcaggtcgcagggcggcctgcagctgggccgcggccgaggaggcagcgcgacctccgcacggacttgcaattgtgaccaaatatattacaaagggctg

SEQ ID NO: 878682 - DNA, 99 bp, Homo sapiens
aatggttgccggtcgcacatggattcggtagaactttgccttcctgaatctttttccctgcactacgaggaagattgggccatatggtgctcttcccag

SEQ ID NO: 878683 - DNA, 99 bp, Homo sapiens
tggacgaggcgcggcggtggtatgaagaggccttagccatcagccccacccacgtgaagagcatgcagcgactgaaactgttttggctgggcctacttc

SEQ ID NO: 878684 - DNA, 99 bp, Homo sapiens
ggaactgtatgccagcagcttgttgtacagacaagaacttgggactcactgaatggcgggagtgaaaggagctgtaacacgttcctggccgactcgccg

SEQ ID NO: 878685 - DNA, 99 bp, Homo sapiens
gcatgaagatgagatcaagtccccctgacccgtgggtagtggttgatctagcatctcaacatccaggtgcttaggaaggttatataaactgcagagttc

SEQ ID NO: 878686 - DNA, 99 bp, Homo sapiens
tatttttccccaattcagcagagaatattttcaagggggcatcatcggctggttcgtgcgaagcttcaagtacttttacgggctccgcttcgaggtgcg

SEQ ID NO: 878687 - DNA, 98 bp, Homo sapiens
gctggctcaggacatctgtaggaccagttccagctccagtgggcaccgccagcacgcccagggttttggccaaattgggcgagggcacaaaataacca

SEQ ID NO: 878688 - DNA, 98 bp, Homo sapiens
ctcatctgtagagactgatttgcaacccttccgggaagccatagctctgcatgccataaggatgagtttaccattattcctgtactggttggagctct

SEQ ID NO: 878689 - DNA, 98 bp, Homo sapiens
tcagacgctggcgggcgcagtttctcacgacgggccgagcctgccactgttgaccagtatctctaccacatgcgcctctctgatgagaccctcttgga

SEQ ID NO: 878690 - DNA, 99 bp, Homo sapiens
gtccggagggcagggcacagcaatccacgggtctctgccccactgagcttgcatgtcagacacacattttcagcactgtcatgccaagtgtcaggttcc

SEQ ID NO: 878691 - DNA, 99 bp, Homo sapiens
tgaaattgtatggaactcgcgggtcagacatttcccatttccagtgtcagcttgctgatgaccgtatggcactggtgtcaggcatcagcttagatccag

SEQ ID NO: 878692 - DNA, 99 bp, Homo sapiens
tacaaccaagagacaccaatggagatctgcctcaatggaacccctgctctggcctacctggcggttcttgatacatatttgccagacttcaagatttca

SEQ ID NO: 878693 - DNA, 99 bp, Homo sapiens
gctcggattctcgtagctgtgccggattcatctgaaaactacattaagatgaagacctttgaaggtttctgtgctttgcatctcgctgcaagtcaagga

SEQ ID NO: 878694 - DNA, 99 bp, Homo sapiens
tgaatggattcccagtcaagaaatgctcagccttccaattttttaagaagcgggcggagaaatacgaagacagcgttcctcagagtaatggagagctca

SEQ ID NO: 878695 - DNA, 98 bp, Homo sapiens
caatcttaaaagaaactgtgaagcaaattcgtcagatcaaagaacaagtgggatctttctgtgcttgcacgagttctaacaataacacctactggtgt

SEQ ID NO: 878696 - DNA, 98 bp, Homo sapiens
tgtagccataaatgtctggctaatggcatttacaggagtctattatcctcccagtccacaacgctgaaccgtggctggacgaatgtttgaggtctgtt

SEQ ID NO: 878697 - DNA, 99 bp, Homo sapiens
cgacgacttctacatcctgggcagtgggctgctcctgtccaaatatgacccccagaaggaggcagagctccgcacctggatcgagggactcaccggcct

SEQ ID NO: 878698 - DNA, 99 bp, Homo sapiens
ctgaagaaacagctaatctgcctccttctccacccccatcacctgcctcagaacagactgtcacagtggaggaagaacaccgaaaagctttggaggatt

SEQ ID NO: 878699 - DNA, 99 bp, Homo sapiens
acctagacaaagggagagggtgaccgacatcccaactagggaccagtccaacgtcaggcggatgcacacggctgtgaagctcaatggcgtcgtcctcaa

SEQ ID NO: 878700 - DNA, 99 bp, Homo sapiens
ccaggattcctctttgttggccaaaaggcagattgcgcagtctctttgtggagaggacttgatcattaaaggaatcagcgttcatatatccaatgccga

SEQ ID NO: 878701 - DNA, 99 bp, Homo sapiens
caacatcgtattgcacctggctacaactgcaagagggcacattgggagattcagcttgcaagagtcctgaatctgatctagaagacttctccgatgaaa

SEQ ID NO: 878702 - DNA, 99 bp, Homo sapiens
tgcgtttttttccaacatgctcacaatctccatttccactttgttgcccaggggctggctctgagccactttaattgaattctgggtagagccaccagc

SEQ ID NO: 878703 - DNA, 99 bp, Homo sapiens
gaaacttttctgaaaaggaattctgattcattgccacacagattatcaggctgcccggcagctctgacagactcagaggacgagtccccagaagacatg

SEQ ID NO: 878704 - DNA, 99 bp, Homo sapiens
ggctgaggcaggagaatcacttgaactgtatgcattcttaaaaagacatccatgagtagctgaagagttcaggaaggcagcaattatttttcatgccat

SEQ ID NO: 878705 - DNA, 106 bp, Homo sapiens
gactttcttccagcttctgctgtccttctttgtggagagcaagctggatctaccatgaaagacttgtgaatccaggaagagagactgactgggcaacatgttattc

SEQ ID NO: 878706 - DNA, 119 bp, Homo sapiens
tcttcacgggagctgcagacagtggcctcctgggcactcctgggggaatcagctgcagacagtggcctcctgggcactcctgggggaatccctggggggatccgaactggccgagatgg

SEQ ID NO: 878707 - DNA, 99 bp, Homo sapiens
acaaccaacggctcaagaatttcaagaacaaaggccgcgacttggagaattaaacaaccaccatgtcgagcaaaaaggcaaagaccaagaccaccaaga

SEQ ID NO: 878708 - DNA, 99 bp, Homo sapiens
agacaccaaaccattactggcttctaaggtcccgaaacctttttctggcccagtaagactacactcctccaatcctaatttgtcaacactagattttgg

SEQ ID NO: 878709 - DNA, 99 bp, Homo sapiens
gatgcctgaagctcaagggactgtgtccaccctcaggtagtaagcattaataatgtctttcatctttgagtggatctacaatggcttcagcagtgtgct

SEQ ID NO: 878710 - DNA, 99 bp, Homo sapiens
gcaaatgaagttgatggaattacactgtgatacgactgactcagccagactgccttccgggtcactgccatggaggagccgcagtcagatcctagcgtc

SEQ ID NO: 878711 - DNA, 99 bp, Homo sapiens
acgccccagctgctgaccctggtgcccaggggctgggatgcccacaccacctgccagaaccactcacgaattcttgtttggtgcccttgctgaactggt

SEQ ID NO: 878712 - DNA, 99 bp, Homo sapiens
gtagaccttccacactgccacctgattaaaggaattggatattaccttccaaatgatgatggagaattttatcagttctgttacgttacccataagggt

SEQ ID NO: 878713 - DNA, 99 bp, Homo sapiens
tggcccgggccggcgcgggagggctgtgtgatggcctcggagcgcccggagccggaggtttggaattcacccagttgcaggccgaatgcctggtcagct

SEQ ID NO: 878714 - DNA, 99 bp, Homo sapiens
tgaaggggacagtgtgggagaatccgtccatgggaaaccttcggtggtgtacagatttttcacaagacttggacagattgtcctgctgaaggatcagag

SEQ ID NO: 878715 - DNA, 99 bp, Homo sapiens
gaactgattagccgtctggagcaaagacaggagccctggaatgtgaagagacatgagaccatagccaaacccccaggaaatgggtcctgatgaatatga

SEQ ID NO: 878716 - DNA, 99 bp, Homo sapiens
acttgcatgggccttacttctataacagggcagcagcgttctcggatgctagctactctttttaaggatgaaaggtgccagcaacttgctgcctatggg

SEQ ID NO: 878717 - DNA, 99 bp, Homo sapiens
agaaagcggcttatcgaacagagccgggagttcaagaagaacactccagagtgaaggagaacgacctgctcagaatgagaagaggaaggagaaaaacat

SEQ ID NO: 878718 - DNA, 110 bp, Homo sapiens
ccagtctccgagagcggattgagttcctcaatgaggcctcggtcatgaagggcttcacctgccatcacgtggggtcctgtggctgtctgtggtctccgaggtgctgtaca

SEQ ID NO: 878719 - DNA, 128 bp, Homo sapiens
cagctcccagcgtgagcgacgcagaagacgggtgatttctgcatttccatctgaggctactgaaagcattaaaatgctggtgacattgtgtcaatctgatactgaagaaatcagaaatgtggcctcag

SEQ ID NO: 878720 - DNA, 99 bp, Homo sapiens
caactggtggcagagttatgaggggcctttatcatctgctggactcctggattggttttgttacttctagacgtgtgctgtccacagtgcgacgtgctg

SEQ ID NO: 878721 - DNA, 99 bp, Homo sapiens
ttgctgccttcgtctgcacttaccttggaagccaatatatcttcacagaaatggcctcgagggctctgaactcctacttcgagcctccggtggaggaga

SEQ ID NO: 878722 - DNA, 99 bp, Homo sapiens
gaaaaattacagcaatattatatttttattccctctaaattcaagtgtacttccccaggtataccagcccatatgcaaagcagatctatgttaagacct

SEQ ID NO: 878723 - DNA, 99 bp, Homo sapiens
cgggccgtgaacgaaagcagtgacggaggagcttgtaccaccgggcagtgatcacaaccagattcaacgtatgcacaaagcagcggataccatggtagc

SEQ ID NO: 878724 - DNA, 99 bp, Homo sapiens
gccaacatgtggttcaagaaccttgacaagctcatccggctggtaaatgcgcaggtgggcaaacgcagaggcgggaacaaactagccctcaagacggga

SEQ ID NO: 878725 - DNA, 98 bp, Homo sapiens
tcagatcttcacagcacagttcctgggaaggtggagccaccagcctctccctgaggaggaagatgactatctctttgatgatcctctgccaatacctt

SEQ ID NO: 878726 - DNA, 99 bp, Homo sapiens
gagaatccctaaggcggggaaccgcagcgcagtgacagtgcagaaccccggcgcggcccttgcattttgcccttaccatattggtcatttctcccttgt

SEQ ID NO: 878727 - DNA, 99 bp, Homo sapiens
cagtcacacctgcggaggttctgccttcagtatattgatcagtggaataaagttattgaacagcttggaacaccatgtcctgaattcatgaagaaactg

SEQ ID NO: 878728 - DNA, 99 bp, Homo sapiens
tttctcttcgtgggagtcatgaccgcccagaaatacctgcagactcgggccgtggccgcctacagatcaggagaacctcagtctgacgacattgaagct

SEQ ID NO: 878729 - DNA, 99 bp, Homo sapiens
attaaaggcatcaagactgcaagcaccattgccaactcttctaagaaagttcgggtcggttgtacgccgtgcagcaagtcttttaagtaaagtagtgga

SEQ ID NO: 878730 - DNA, 99 bp, Homo sapiens
accacagtgctcttcatagttcaaattcacattcttctaatccaagcaataacccaagcaaaacttcagatgcagctttgctctctgtacatgatactg

SEQ ID NO: 878731 - DNA, 99 bp, Homo sapiens
caccatcctccgaccctcctacaccgggctttcttcttcttcagcgagattcctgagccgttctatccctggtgatgatgatgcttatctgtgtattca

SEQ ID NO: 878732 - DNA, 99 bp, Homo sapiens
aggatgaagacctttatgatgatccattcccacttactgaatattaaagccttccatctgaagtatgatgaagttcgtctggatccaaatgttcagaaa

SEQ ID NO: 878733 - DNA, 98 bp, Homo sapiens
ggatatctttattgaagctcacctttgtctaaataatgacttggatatgtcggaattcttaattaatccaaatgcaggtccttgccgctataatctga

SEQ ID NO: 878734 - DNA, 99 bp, Homo sapiens
gaacacccagcccatggaggagatcggcctcagcccccgcaaggatggcctttcctaccagggattaaagcctgtggtttccacagaagcaccacctat

SEQ ID NO: 878735 - DNA, 99 bp, Homo sapiens
gtggaactcagcagcggaggctggacgcttgcatggcgcttgaggagtctactcttcatcttgtgttgagacttcgtggtggtgctaagaaaaggaaga

SEQ ID NO: 878736 - DNA, 99 bp, Homo sapiens
ctgctgatccacatgagagtccactctggggagaagcccaacaagtgtacgtttgaaggatgacctctaggaagaaagtgttgctgaaggttatcatcc

SEQ ID NO: 878737 - DNA, 99 bp, Homo sapiens
gctgcgctaccggaatgtcatccagcgagtgattagtccaaaagaaactcttccttcaaaacctgtgaagaaagagaaggaacagaggacacgtcactt

SEQ ID NO: 878738 - DNA, 99 bp, Homo sapiens
atgtgaagctgcaacagtgcagagttgccaaaaaggcaattctcaagttcaactactcagtgcaggaggagagcgacacttgtctgggaggcaaatggt

SEQ ID NO: 878739 - DNA, 99 bp, Homo sapiens
cagctatgcatgctgcttttgatgtctgacaacgtggatcgttgttttgaaacgaaaagcaggtgatattctcagtggagaccaggacaaggaacagaa

SEQ ID NO: 878740 - DNA, 99 bp, Homo sapiens
cctgccttaagaaaaaacaaaaatattgacaactttttaagcagatattcgcttcaagctcagcttatcaatatgggtgttattcctaccttagtgaaa

SEQ ID NO: 878741 - DNA, 99 bp, Homo sapiens
catcaatgccagcttccgccagtgccagggtgaccggttgtggtcagaaatgagaagacatgaaatgttgagggaggagctgcgacagagaagaaagca

SEQ ID NO: 878742 - DNA, 98 bp, Homo sapiens
gggagtctgactccaatgaattttctgtaattgctgacccaagaggaaacactctaggacggggaacgacaattactggtggacttgctttgtgaaga

SEQ ID NO: 878743 - DNA, 98 bp, Homo sapiens
tgttttgcaggcagccctcggagtgaaacatggagttcttctgactgaaggatgtacagttacccagcacgtgtacctcctcctcctcctattgctcg

SEQ ID NO: 878744 - DNA, 99 bp, Homo sapiens
cagtactgcatcctgctcctcttctacttggcctacatccatgaagacaggtggcgacatgtctaagaatgtgagccagtcacagatggcaaaattgaa

SEQ ID NO: 878745 - DNA, 99 bp, Homo sapiens
ggaaaatatcagtgagcttgaagacagtctatctgatggatgccaggctcctgttgcaggctccggagggcaatgagggcagcctccttcacatttggc

SEQ ID NO: 878746 - DNA, 99 bp, Homo sapiens
ggggagggcagttgaggaccccgcggaggcgcgtgactggttgagcgggcaggccagcctccgagccgggtggacacagaatgaagaaggatggaggag

SEQ ID NO: 878747 - DNA, 99 bp, Homo sapiens
cgtagcgcccagctcattgcctcagctaaggcacaccaataaagtttgacaacaactcaggtcaatctgccatcaaacacaatgtcaaatccttaatca

SEQ ID NO: 878748 - DNA, 99 bp, Homo sapiens
aggcagacagtggggaggaagaatgccggtcacagcccaggagctttacctttagtccaagtggatgaaaagggagaaaaagtaaggccaaatcaaaat

SEQ ID NO: 878749 - DNA, 99 bp, Homo sapiens
ctattttcttcctgcccctcgttgatgagagcattcgaagtgacctcagcagggcatccagcacccagaggcctccattcaggctgttttttcagatgc

SEQ ID NO: 878750 - DNA, 98 bp, Homo sapiens
tcttgcctcagaatgaacaaccatattctaccttggtgaataacagcgagtgtgttgcaaacatgaaaggtggagtattgctcctggaaaatccaaaa

SEQ ID NO: 878751 - DNA, 99 bp, Homo sapiens
cagagaccagaatgaaagtcggggaagtccttatgcgaatcgtcagggcattaggtactccaaagattcaggtttactcacgtcatccagcagagaatg

SEQ ID NO: 878752 - DNA, 99 bp, Homo sapiens
gaaaggaaaaacagtgctcggaaagcatctattgtgaaaaacctaaaggataccttagtagaaaccattgaaggttttcagtgttctccctatcctgaa

SEQ ID NO: 878753 - DNA, 99 bp, Homo sapiens
taaaaacaggatgaaaaagactgattggctcttcctcaatgcttgtgtggtttcagctgtgagttcaacatggaggcaaatcagtgccccctggttgtg

SEQ ID NO: 878754 - DNA, 99 bp, Homo sapiens
gtggatttgtgtggagcacacattgaatgggccaaggaaaaatcgagcagaaagaatgtctttcagggctgtcacatggtgactgaagaacttcattcc

SEQ ID NO: 878755 - DNA, 98 bp, Homo sapiens
agttattccagaaactaatgaggatgttatatctgatccctccaagtggagtttgtccatatgctcaatgctaccatgtgcgccactacccgtaccat

SEQ ID NO: 878756 - DNA, 126 bp, Homo sapiens
tttcaaaacagttgtatggtatacttcaaataccccatgttagatacgctggattttcaaaacagttgtatggtatacttcaaataccccatgttagatttccaatatataatgcaattctctttc

SEQ ID NO: 878757 - DNA, 99 bp, Homo sapiens
cctagatggatgtacagccatcaagaggatcttaaagtgtggtctttagtggaaaaaaagattgagaggatccagaatccagatctctggaatagctac

SEQ ID NO: 878758 - DNA, 99 bp, Homo sapiens
aatgccatgctgattaaagggggaaatgcaaatgcaacagtgacaaaagtacttaaagatgtgcgggagtcgtgtgaggttggctgtagcagcgcggaa

SEQ ID NO: 878759 - DNA, 99 bp, Homo sapiens
cctagaaggaccaagatggcagcagtgactctgctggctttggcgtatacacagaaaatatttacaccagcagctccagttcataccaataaagaagat

SEQ ID NO: 878760 - DNA, 99 bp, Homo sapiens
tatatttggcatactttgtgcatgcagcagcattgcagtgtcgagatggctatgaaccctgtgtaaatgaaggaatgtgtgttacctaccacaatggca

SEQ ID NO: 878761 - DNA, 98 bp, Homo sapiens
gaaaagggaaaacttgctgcggttgctcaagtttgaaggaagaaagtactgtgaacatgactttcagatgctctttgccccttgctgtcatcagtgtg

SEQ ID NO: 878762 - DNA, 99 bp, Homo sapiens
gcggacatcactttagaccctccacctaattgcaggtgaagccatcagtgtctacagcttcagctattgcccgtgtgcagatggtgcttaatctctctt

SEQ ID NO: 878763 - DNA, 99 bp, Homo sapiens
caggcgaagccgcggaggacggggtgaagatggcggccttctccgtcttcttctccacacaagatgaaagagtccagcccattgagcagtagaaaaatt

SEQ ID NO: 878764 - DNA, 99 bp, Homo sapiens
cacgcctcggtagggaccaatacatagtccaattcatcaattaagtgttctttcaaggtctgactctcaggatctgtaatcccagctacttgggaggct

SEQ ID NO: 878765 - DNA, 99 bp, Homo sapiens
tctctgcagtctttatggacaaacctgaagagtttatatctgaaatggacgtcgctgaaaattttgttccccctctgttggatgcagttctcattgatt

SEQ ID NO: 878766 - DNA, 99 bp, Homo sapiens
aactgctcatacagaattacgcatttccacttctaatggagaccaagacacattccaccccagtggggggtcccataccactcatggatctgaatcaga

SEQ ID NO: 878767 - DNA, 99 bp, Homo sapiens
ctggagtgggcgcggaggcgaccgccatggcgttcctcaaactccgtgaccaggtacttcgtactggatttcgaggctggcatcctgcagtattttgtg

SEQ ID NO: 878768 - DNA, 98 bp, Homo sapiens
gcaccgccaccggcccgacctcatagatgccctgtatccaagcccaatatgggacaccagcaccgagtccgggaccccgtgaccacctggcaagcgac

SEQ ID NO: 878769 - DNA, 99 bp, Homo sapiens
gggtgacagagcgagactccatctgaaatttagccacacaactggaattgcaaaagttgtacagttttccatcaggcattgtggcttggtattgaggta

SEQ ID NO: 878770 - DNA, 99 bp, Homo sapiens
ggatgccagaacagaaccctgggaggggaattccagcaccgcagcaaccactccagaaactttccctccttcagccatcctggggtctccagctagtgg

SEQ ID NO: 878771 - DNA, 99 bp, Homo sapiens
agatgaggcaggagctcatcgatctccggggaccgatatccttggaacagaagatcttattgtggaagtgacttccaatgatgctgtgagattttatcc

SEQ ID NO: 878772 - DNA, 99 bp, Homo sapiens
gggtgctgctggttagtgtgctctgagggagggtccgagccagccgctgttttgccggaggagcccctcaggcctttgcctgagaatacagatcaaccc

SEQ ID NO: 878773 - DNA, 99 bp, Homo sapiens
catctttctggatgatggagtggatgaacaagtactgatggaactaaaaactgaaatacaactggagcacgcaaagcaagcctttgtgcaacgggacaa

SEQ ID NO: 878774 - DNA, 99 bp, Homo sapiens
cggcatgatgttcgtccgcaacgattgcaagagtttcaagaagtttttaaccgaagtgtcatgattattgcagcaacaaatagacctgatgtgttagat

SEQ ID NO: 878775 - DNA, 99 bp, Homo sapiens
agaattatcactttggctggacccactaatgccatcttcaaagcctttgctatgatcattgacaaactggaagaggctggagtgcagtggtgcaatctc

SEQ ID NO: 878776 - DNA, 98 bp, Homo sapiens
tggtcagagcgagtctcggagaagatgtggtggcttccgtttgttggtggaggaggtggcaggcctcggcggaccaaaatgtctttgactccaagaag

SEQ ID NO: 878777 - DNA, 99 bp, Homo sapiens
ccaccagtttctgtatttcctaaaacagaggcagaatggactgcatccttcttcaacgcaggatctttcgaagatggtttggctgccttggagatttgg

SEQ ID NO: 878778 - DNA, 98 bp, Homo sapiens
tttgtacaactatgaaaacatacctgttgataaagttgaggctttaatgactgatgaaacaatatccaatgtgccaatccttatcttgggtaacaaaa

SEQ ID NO: 878779 - DNA, 99 bp, Homo sapiens
cattggagtgagagaaagagatgctttctacagttatggaggtcactcctggaagcaaggcggctctagctaatttatgtattggagatgtaatcacag

SEQ ID NO: 878780 - DNA, 99 bp, Homo sapiens
ggctgcgttgaggatctttgctcttccatccgcctttgatcgtcttcctcttcagccatccaggaaccacgtgaatgttgagggggcgacacacaagca

SEQ ID NO: 878781 - DNA, 99 bp, Homo sapiens
gggtgagagactatagcaagcaggaccaaaatgtctttgactccaagaagaaagtgaaattaaccaatgcggaaggagtagagtttaagctttccaaga

SEQ ID NO: 878782 - DNA, 98 bp, Homo sapiens
aagttggagacatccaggtctgcaccatgggttggggcgtgagacacatcacatttgtggacaatgccaagatctcctactccaatcctgtgaggcag

SEQ ID NO: 878783 - DNA, 99 bp, Homo sapiens
cttgaaaatcatgattcatttcatccacagatcaaaccatgtaccaggtccccaggatgatcgtcccggtgcggacatggcaacagccgcagcaccggg

SEQ ID NO: 878784 - DNA, 99 bp, Homo sapiens
ctgagtcactgcctgcgcagctccggccgcctggctccccatactagtcgccgccctatttttgaggaagatacaccctctgttatggaaattgaaatg

SEQ ID NO: 878785 - DNA, 99 bp, Homo sapiens
ccattctggaagacttgcccatccaatctgcctggtgaggagatggaggcttgtgaggagctggccctggccctgtctcggggcctgcagctggacacc

SEQ ID NO: 878786 - DNA, 115 bp, Homo sapiens
ctgcctggggcccacccaccgcatggacttcctgctggccttctccagggccctgtttgtgctcttcgtcctggcctacatccacatcgtcttctcccgctcgcccatcaactgc

SEQ ID NO: 878787 - DNA, 99 bp, Homo sapiens
agacatgctctacagtgctcagtctttgaggtgatttggggaactggtcagctctttcaagctcagcaagacctactacatcgaacagctcccctactc

SEQ ID NO: 878788 - DNA, 98 bp, Homo sapiens
gcctccagtactggggatttgccaaaagatattgatgatgttaagaagttcaaaccgggttacctggaagctactcttaattggtttagattatataa

SEQ ID NO: 878789 - DNA, 99 bp, Homo sapiens
gccctcagcatggctttttacagcagcccggaaattctgagggtttgtctgccattgtggatttcctgggcagagtggagtgaaggtgccaaaagccaa

SEQ ID NO: 878790 - DNA, 117 bp, Homo sapiens
gctggcacagggagacggaacgtggaacgtctgtaacttcccccacagacgagcatggggaagttacagacgttccacgttccgtctccctgtgccagccctcaggacctgagcagc

SEQ ID NO: 878791 - DNA, 99 bp, Homo sapiens
ccggtggtcgtgtccaactgctcctgcacccgggaggactatgagtgctccctgggctctgtcagctagcagagcatttggtggaagaaagacagccca

SEQ ID NO: 878792 - DNA, 99 bp, Homo sapiens
aatggaaacattcccggaccatggtcgtcaaagtcctacattttagctttcagtgctgaacttccttctcccttaaattattataaacttttgctgctg

SEQ ID NO: 878793 - DNA, 98 bp, Homo sapiens
ggacattcgcaagcagatgttaggcataatggacagtgatttaaagggagtgatagtcactctgagtgatgatggtcacttgcagtgttcatacctgg

SEQ ID NO: 878794 - DNA, 99 bp, Homo sapiens
ggaggatcccttgatgccaagagttcgagaccagctggggcaacaaaggttacacatcattttggaatgactgtatatcatctggattacgtggctgta

SEQ ID NO: 878795 - DNA, 99 bp, Homo sapiens
gatggtgaagagcagacacagaaaacccaagggaaaaaaagaaaggcccagagcattccagccagggttcatagtggcgtcatgcacgcagactcctgc

SEQ ID NO: 878796 - DNA, 99 bp, Homo sapiens
aatcagatacttacggcaataaagcaaagaaacaaaagacaactctgcttttccagaaactgtgccaggatcacgaaactgttcaggttccattatcaa

SEQ ID NO: 878797 - DNA, 99 bp, Homo sapiens
tctcaggaagcagtactattcaagagatttatactatggtggggaagctttctctgtagagcagccacagtcttttacttgtccctattgtggaaaaat

SEQ ID NO: 878798 - DNA, 99 bp, Homo sapiens
tcccaatcccactgatgaggatcagcccatggttcaggaagatttgactgaagagaaaaaaagggaactggagcataatgctgaagagacctatggtga

SEQ ID NO: 878799 - DNA, 99 bp, Homo sapiens
aggacttccctgaaaaagctaaggatatctttattgaagctcacctttgtctaaataaagttcaacctggtcattgctatcatctgtataatggtctta

SEQ ID NO: 878800 - DNA, 99 bp, Homo sapiens
tgcaaacctggagccagaaacattaccgtcatattccacccattactaagaagtccaaggcttgcgagaaggtcatttccgtgggtcaaacggtcatca

SEQ ID NO: 878801 - DNA, 98 bp, Homo sapiens
actgggattgctgtagcggccattgttgctgctgtagtggccttgatctactgcaggaaaaagcggatttcagcttttctgcaattagataaaaaagg

SEQ ID NO: 878802 - DNA, 99 bp, Homo sapiens
tccgctgtacctggatcctgctcctctgggttgaaacccgggcgccgccaagatgccggtagctcgtaagctggtcatcctggagggtgagctggagag

SEQ ID NO: 878803 - DNA, 99 bp, Homo sapiens
agcacaagttcacgaaagcctacaaaagtgtggagaggttccttcaggaggatcagcatccgcagtgtcatgcagaagtacctggaggaccggggcgag

SEQ ID NO: 878804 - DNA, 99 bp, Homo sapiens
cctcccgagtagctggaactacagtagatattcagactgacaatgatttgacaaaggaaatgtatgaaggaaaagagaatgtatcatttgaacttcaaa

SEQ ID NO: 878805 - DNA, 99 bp, Homo sapiens
caggctgagaagcagaaggccaggggggtcctgatgacaacttaattgaaggtggaggaacaaaatttgtctgcaaacctggagccagaaacattaccg

SEQ ID NO: 878806 - DNA, 99 bp, Homo sapiens
actcacctaacaccgcagcagcaaccgggcccggccaggttcggcgttccgtgagtgaacgccaacttctcccagtttgccttcgagtccgtggtggcc

SEQ ID NO: 878807 - DNA, 99 bp, Homo sapiens
gggcgctttccgtcggcgtgtgttttggggttgccatcggcccgtagtatgtgaaaagacagtcattttgtttactcattcagccctgttgcaggtccc

SEQ ID NO: 878808 - DNA, 98 bp, Homo sapiens
ttgaagggaaaccatatactgtgaatttaatgcaaaaggaggtggggaagacagggctccagctaccacaggacgggctctgggtatagccgttccag

SEQ ID NO: 878809 - DNA, 99 bp, Homo sapiens
gctgcatttgacaaaggtgatgatcgaagacttggcaaaaagcctatattcagtagctcgcaggtattgtccccagtatcagaaccggaagaagaaaat

SEQ ID NO: 878810 - DNA, 99 bp, Homo sapiens
ctcactgcaacctctgcctcccagcaggggaaatgctgtctgtagctgagcacttcctggagcagcagatgcacccaacagtggtgatcagtgcttacc

SEQ ID NO: 878811 - DNA, 99 bp, Homo sapiens
gctccagcaggcgctggctcctgctcaggtgcatgtgagggaaccctggcttgttcaacctgtcacctcatctttgaagatcacatatatgagaagtta

SEQ ID NO: 878812 - DNA, 99 bp, Homo sapiens
agacactcaggcagacgaggatgaaagagcccaggagagtcaggttgtggacctggcctattagcagatgccaagatgcgggtatttgaacgttcagtg

SEQ ID NO: 878813 - DNA, 99 bp, Homo sapiens
ttctttaatatgctggatgagctgctgaagcccaccgaattagaagttcaccatgtctattctcaagatccatgccagggagatctttgactctcgcgg

SEQ ID NO: 878814 - DNA, 98 bp, Homo sapiens
tagaggctggatggccctgttccgggcctctcctgagaatggctgaggaggcggcccgaaaactcctcccagaattctggggagacattgccaaggaa

SEQ ID NO: 878815 - DNA, 100 bp, Homo sapiens
ggtctttgatagtgatgacccctccaaaacgtcctcgactgagaatagcttgggcaacacagccacatccaaggaccaaaaaccatttgtgtttcaagac

SEQ ID NO: 878816 - DNA, 99 bp, Homo sapiens
gggccgagatgtctcgctccgtggccttagctgtgctcgcgctactctctctttctggcctggaggctatccagcgagtctgcactatggaaacaacct

SEQ ID NO: 878817 - DNA, 99 bp, Homo sapiens
agggcggaaagggtggccgagcgcgggcggaggacggagaagggggcggcgagggccggaatctcgagaaatgcactcggtgatggaaagagagccact

SEQ ID NO: 878818 - DNA, 98 bp, Homo sapiens
gctggacgacctcggcgaggtgcccaccatcgagtccctgatagacttcattagaggggtggtagactcggaggatctccctctaaacatatcccgtg

SEQ ID NO: 878819 - DNA, 99 bp, Homo sapiens
tgccctgaggttggacgtggggaatttctcctggggctcagagtgcaaacctgtatgtgggactggtggtcatgtgtggcttcgtcctttttgatactc

SEQ ID NO: 878820 - DNA, 99 bp, Homo sapiens
gatccacttccacttaatgaatagcctcctcgctggggaggcagagtcctcgcgtggtctcctgcctcgagcacagcctgtgcccaggggagccgggct

SEQ ID NO: 878821 - DNA, 152 bp, Homo sapiens
atcgaagagtccccccaagtctcctcctaacttgataagtagaccacaattggacctctacttatcaagttaggaggagacttggggggactcttcgatcgcgacctggatttggattccctcttggacactgggggaggactcctggaccg

SEQ ID NO: 878822 - DNA, 99 bp, Homo sapiens
tggacttcaagaaagagacagaatggtccgagcatgcattgccattatctgtgaactagtttcaaccacaccacgggcttttgaccacacaaaacagaa

SEQ ID NO: 878823 - DNA, 99 bp, Homo sapiens
tgatgctccatggagtcctaaagggtgtggatgaatggaacatagctcgcctcaatacagtcttggatgtggttgaagaagagtgtggcatttctattg

SEQ ID NO: 878824 - DNA, 99 bp, Homo sapiens
tttgccctggcaaacactggaatcctactttttctgtacaacaaataacactgtgactccaacctcacaacctgtgcgaaagtctacctttgatgcagc

SEQ ID NO: 878825 - DNA, 99 bp, Homo sapiens
tctgctaatcatcatttttatactatctaagtttatgcctaagcgtgagtgcatctccatccacgttggccaggctggtgtccagattggcaatgcctg

SEQ ID NO: 878826 - DNA, 99 bp, Homo sapiens
cccacagtgctgggattacaggacatagagacactgcatattttaccaaggctttgactggaatggcatgctttcaaatataaacagacggctttaagg

SEQ ID NO: 878827 - DNA, 98 bp, Homo sapiens
gcacagttgaagcagtgaggtggtgccagtccatgcaggatccttctgtcaatgtagtttctctccctggctcatcttgcatgcttgctctgatggaa

SEQ ID NO: 878828 - DNA, 99 bp, Homo sapiens
gccggtgctaatggtgctcctggactgcgaggtggtgcagaagtacatttgaagaacgcaagtagagggagtgcaggaaacaagaactacaggatgtag

SEQ ID NO: 878829 - DNA, 99 bp, Homo sapiens
gctgaactgggtgctttatataggatgggacgcctatgcctgacagctacccaacaaccccatcttcaactgatgcagctacatctgagtccaaggaga

SEQ ID NO: 878830 - DNA, 98 bp, Homo sapiens
tgggatgtgaaaactctgttactgaagcttttgaggaacttgaaaaagctttgagtacagcccaaaaaacagaggaagcacggagaaaactgaaggca

SEQ ID NO: 878831 - DNA, 99 bp, Homo sapiens
ctgggccaggtattgctccggagggtgttactcgttagcgtcagtttttaatcctgctgcatcacagaagctggaagttctgatgttccactgaaatca

SEQ ID NO: 878832 - DNA, 99 bp, Homo sapiens
tatttgtgttgttactgatgcagagatacagcaaaagagtctacataggtattttggcctctccccagtctgctcctggaaacttggacaatagtaaaa

SEQ ID NO: 878833 - DNA, 99 bp, Homo sapiens
gaaatattttgttatatgggcttctcatatcttacccacagttgcattaaaatcctcccctactgaaagaaacggaggccaggataactgtagagcagc

SEQ ID NO: 878834 - DNA, 98 bp, Homo sapiens
tagcctcttctgcaagtggggcattcacacaggaacaagctgaaagctggatacctaatgtcagtggagtcttctgagtgtttcctggaagaagtcgg

SEQ ID NO: 878835 - DNA, 99 bp, Homo sapiens
gacatgcaaaacttgcagattttggggtagcaggtcaacttacagacatggtccggcgaggagagatcatcgacaatgacaccgaggaggagttctacc

SEQ ID NO: 878836 - DNA, 98 bp, Homo sapiens
aaataaaaactggagaatggttctatgaggaacgagccaagaaatttccaactggagcttaaaactagagatcgatacatcagtagtctgaaaaagaa

SEQ ID NO: 878837 - DNA, 100 bp, Homo sapiens
tggtcaactaagtagagattcataagacctttatagaaccactgacaacagtgttgtcagtggttctataaaggtcttatgaatctctacttagttgacc

SEQ ID NO: 878838 - DNA, 99 bp, Homo sapiens
gaggaccgtgggcagccagggtcggtgaagtaatggaggggaaagttccagtcgcagcgctgagaagcgatcagctgaagaagaagctgccgacctccc

SEQ ID NO: 878839 - DNA, 99 bp, Homo sapiens
ccagctcatccatgaggccacatcttggacaagtcagttgttcttccatgaccaaataactctgccttgatctcttctactttcctcctgtcatcttca

SEQ ID NO: 878840 - DNA, 99 bp, Homo sapiens
ggtctttggcttctcgactcggtcctgtttcgacagcgaacatgtcgcggcctgtcaggtcaatctatgctgtatttgaatccgacgttaatctgaaag

SEQ ID NO: 878841 - DNA, 112 bp, Homo sapiens
ttgggtgcgccttcccggcgtctaggggagcgaaggctgaggtggcagcggcaggagagtccggccgcgacaggacgatgtctgctccaatgaggatctccctgaagttgag

SEQ ID NO: 878842 - DNA, 99 bp, Homo sapiens
tgtaggatgtggtgaaagaggaaatgagatgtctgaagtcctccgggacttcccagagttgccagtagtcatcagagtaccaaaactgatctatttctc

SEQ ID NO: 878843 - DNA, 99 bp, Homo sapiens
tgggaccggtgtctggcggatgcggtcgtgaagatagctgataggaagatgtcttcaggaaatgctaaaattgggcaccctgcccccaacttcaaagcc

SEQ ID NO: 878844 - DNA, 99 bp, Homo sapiens
ggcctagcgtcctggaattacttcaatcaagccgccatggcatcagatgaaggcaaactttttgttggagggctgagttttgacaccaatgagcagtcg

SEQ ID NO: 878845 - DNA, 99 bp, Homo sapiens
ttctatatgtttcattccttcaagcaattcccaagatatgttcaaaccttgtactactcagctgatcacaagctgcttgatgggaacctactagatgga

SEQ ID NO: 878846 - DNA, 98 bp, Homo sapiens
agtaacaacagcgaggaagaagaggacgacgacgacgaggaagaggaggtttctgaggaacaatccctttgtgaaggctgctggtatgtgaatgtgtg

SEQ ID NO: 878847 - DNA, 99 bp, Homo sapiens
gctgtccacaatgtccttttggctgatatttctgtattcatcaaatgcatcttctgaacctgtgataatgattggcaactcaggatgaaagctggcaca

SEQ ID NO: 878848 - DNA, 99 bp, Homo sapiens
cgcgttttgccagcgataatacgcctcagtgattcgcctttgccagtctcatctcgtgtctgctttgttaagttccatgatccagactcagcagttgtg

SEQ ID NO: 878849 - DNA, 99 bp, Homo sapiens
tgcagttggctgtgaatgcacattgtgttctgcaaaaaacaaaaaggatagcctccggcattccagctggatagaacttatactggcttgcagactctt

SEQ ID NO: 878850 - DNA, 99 bp, Homo sapiens
gcaactctcagttcgagagtaaagtcatgttggaagcctctgcagagaacattttacagcaggacttttgccatgctatcaaagtgggagtgaaatata

SEQ ID NO: 878851 - DNA, 98 bp, Homo sapiens
aaaaacaaagagttatatgaaatcaatcctccagattgtcagtggcttcgccccgaggagagctgactgccctgggctgctgcctccggcagagctga

SEQ ID NO: 878852 - DNA, 149 bp, Homo sapiens
tgcatggaggagctggtgagcctcatcacacaggatccgcccctggacatggaggagaaggtccgcttcaagtctgccatcatggatgttctcgcagaagcaaatggcacctttgccttaaaccttttgaaaacgctgggtaaagacaa

SEQ ID NO: 878853 - DNA, 99 bp, Homo sapiens
tcagaattctgtatcagtgccatttttccagccagcgtgtgcttacttcatgtctctgggtcacattttgatatttggagttcttacaacatggcagac

SEQ ID NO: 878854 - DNA, 99 bp, Homo sapiens
ttccacttagttctgaggtgaagacagatcatgggactgataaattggaggaacatatgcagcagaaaaaagaggaggaagaagttcttaaagaagtaa

SEQ ID NO: 878855 - DNA, 99 bp, Homo sapiens
ccatggaaggagtaagagctgggtacttcttctcaattcccccttctatcataagaagtggacagaatccttgcagcctttcctggaagcctgtagcaa

SEQ ID NO: 878856 - DNA, 98 bp, Homo sapiens
ggcctccaggaggcactcagtgcccgcatccccctccagagggctctgcccgaggtgcggcacccactatccagaaccagaaccacagcccttctgag

SEQ ID NO: 878857 - DNA, 98 bp, Homo sapiens
agccttccggggccacactgatccgaaaacatcggttgtgaagagaaagccaaaaagaatgccaacaagcctttgctggatgagattgtgcctgtgta

SEQ ID NO: 878858 - DNA, 99 bp, Homo sapiens
tcagtgttctcaactcccacacacaggatgtcaagcatgtggtttggcacccaagtcaggagttcactttatccaaatgcatagatgccgtgatggtgc

SEQ ID NO: 878859 - DNA, 99 bp, Homo sapiens
gaagacttgtaacctggagaagaggtggcacgcactacccttcttcctggcctcctgaagaccatagcagcaaatcgtaagatgccccttccactgaaa

SEQ ID NO: 878860 - DNA, 99 bp, Homo sapiens
ctggcgctccatggagcacccagggaagctactgtttgctcctaacttgctcttggacagaattctgcttggtcagaatcgtgatggcattgtgttcag

SEQ ID NO: 878861 - DNA, 99 bp, Homo sapiens
gcaagtccatgtacacgcgagattataagaagcttgggttcattgacatccaggcagaaattgatgcccacaatgacatatttaaaagcattgacggaa

SEQ ID NO: 878862 - DNA, 99 bp, Homo sapiens
ctcctcttcatcatcactgaacttcagtttctcagaatagtccacttcttcatggaggctcggttagaagctggtgcagcttgtgatagcctcgctcca

SEQ ID NO: 878863 - DNA, 99 bp, Homo sapiens
ggctcgggacggaggacgcgctagtttttcggctttgtgagaaaccttaccatcaaacacgatggccagcaacgttaccaacaagacagatcctcgctc

SEQ ID NO: 878864 - DNA, 99 bp, Homo sapiens
gtctacggatgaggaaactgaggcctggagaggttaaagagacccgttcagagtcctacagtggcagtgctactatatcggggccacagatgatgcagc

SEQ ID NO: 878865 - DNA, 98 bp, Homo sapiens
gtcccggggacttggggccgcagggagattatcaacgcctgatgactgtggcagaaggcatcaccacacttttgttcccatttcaatggcaacatgtt

SEQ ID NO: 878866 - DNA, 98 bp, Homo sapiens
ttgaactactgccggagcttctgccagcatcaacaacagcaacttgtgattggcggtgaccggatattcagttgcacatccccacatcaatgcactgc

SEQ ID NO: 878867 - DNA, 99 bp, Homo sapiens
agcatcttcagctccatctccagcagagtgacttttccacaattttggtcctgaaaacctcctcctggtccaggttcaccgtgcagtagcaatccctca

SEQ ID NO: 878868 - DNA, 98 bp, Homo sapiens
ggcagaactcgtgattgtcggggggaaagacatccagggctccttgcagagtcaagggtccagagaaggaggagaagttgagacaggcggtcaagcag

SEQ ID NO: 878869 - DNA, 99 bp, Homo sapiens
acagctgggaggtggttactatgtttttccaggagcttcacacaatcgatttgagcatagtctagggtgtcgcacctccttcttttgtagccattaagg

SEQ ID NO: 878870 - DNA, 99 bp, Homo sapiens
gagcggggctggcggacggtgtttccctcccgtgagttctggcacagtgaagctgtggtctaccaatctagacaactcagtggcaagcattgaggcaaa

SEQ ID NO: 878871 - DNA, 99 bp, Homo sapiens
cgggcaagggcctctactttatgcctttccttttcttcgtcattgaaaggatctgacagatctttcttcttatattcccagagattctgggggggcttc

SEQ ID NO: 878872 - DNA, 99 bp, Homo sapiens
cggatcgcatggaagacgcagcctggccgcgctctcccaaggttggagcaatcactgaagaaactgaagcctgtgattggtggagtttgggtgctgtcc

SEQ ID NO: 878873 - DNA, 99 bp, Homo sapiens
ttggtgcccctgggcatcaccaacatagccatcgacttcggggagcaggtgagacatggaatccattaaaattgcattatcagttaagaaatgtacggg

SEQ ID NO: 878874 - DNA, 99 bp, Homo sapiens
cacgtgacctctatgcaacccaaggaaccagggcccctgcaatgtgaagccaaaccactagaggagaggagacgccgtgagcgggacgaccagatgtac

SEQ ID NO: 878875 - DNA, 98 bp, Homo sapiens
gaatataaaaggacttcatctcctcaacatggaaactaagggattaaaatatccaggcatgccaaactttgcgccagatgaaccaggaaaaatcttct

SEQ ID NO: 878876 - DNA, 99 bp, Homo sapiens
cttttttccagcttttcattcagaaattcaactgtctgcagcttaaaggcaagttcatgcttgagagctctgaggtcatccagctgctgccgaagagat

SEQ ID NO: 878877 - DNA, 99 bp, Homo sapiens
tggaaggtgcgtgtggggctgggtctcggagtgggagacgtggagtgcagatttctgcaaatgagaatagcctggcagtccgttccacccctgccgaag

SEQ ID NO: 878878 - DNA, 99 bp, Homo sapiens
tcattccttcaagcaattcccaagatatcagaagatggctgtgccacccacgtatgccgatcttggcaaatctgccagggatgtcttcaccaagggcta

SEQ ID NO: 878879 - DNA, 98 bp, Homo sapiens
cttctgacagtggagacactggcattggaacttcctgttctgatagcgtggaaggtgagcgagtgctgtgctttcatgggcctcttctttatgaagca

SEQ ID NO: 878880 - DNA, 99 bp, Homo sapiens
agaatcgctggcaaaggaggaaaaaccaaattcaccatagagaatgtgacacggacaaggatagttttggctgatgtgagtgcctggaacaacgacccc

SEQ ID NO: 878881 - DNA, 99 bp, Homo sapiens
tggaattgatttgggaacaactggtcgtcttcagttaatggcaagacttgcagagggatcgaagagcagtcataaaaccacaaagtcaacgcaaacaca

SEQ ID NO: 878882 - DNA, 98 bp, Homo sapiens
gagaattcaacacaggtgtgctgcctcctctcctgccaggtgtgtggctgcacaggagtcttgctgatgtcctattttgtaacggattatgatccaac

SEQ ID NO: 878883 - DNA, 98 bp, Homo sapiens
ttttcacctcctgtgagcagtgggaaaaatggaccaacttctttggcaagtggacattttactggctcaagctggtgagattggagagatgaaggatg

SEQ ID NO: 878884 - DNA, 100 bp, Homo sapiens
ggtcaggtgaaacaggggacacccatctcctattcggagtctggaggggctcacccatttttgcttgggacacacatgggtgtcccctgtttcacctgac

SEQ ID NO: 878885 - DNA, 99 bp, Homo sapiens
tgccgactctgggcggcgaggaaggcgtctcccggctctgcagtccttcatccaagcctacgccacctaccccagggagctgaagcacatcttccacgt

SEQ ID NO: 878886 - DNA, 99 bp, Homo sapiens
atcaaggacggcaagctgatcaagaacaatgcctccactgactatgacctatctgacaagagcatcaaccctctggtcaaagttggaaattgtaatact

SEQ ID NO: 878887 - DNA, 99 bp, Homo sapiens
agctgcccgtagatttcagcaatatccccacataccttctcaaggatacaagaccctcctgaaaggaatttccgggaagttcaatagtggtgagttggt

SEQ ID NO: 878888 - DNA, 98 bp, Homo sapiens
acgttgtcaccgcagctggtgatatgctgaaggacaatgccactgagccaacagacctcaggaaagaggggatgaacttgcagactctgcgcttgaga

SEQ ID NO: 878889 - DNA, 101 bp, Homo sapiens
cgagatcacaacattgcacttcagctggtttgatatcattctccaaagaagcaatggagaatgatatcaaaccagctgaagtgcaatgttgtgatctcggc

SEQ ID NO: 878890 - DNA, 99 bp, Homo sapiens
ccagttttgaaatcgacacacaaagaatagagttgagcctgtgggacacttcggctttggacatcagacagtgcaggagaagaatgtgatgcggcagaa

SEQ ID NO: 878891 - DNA, 99 bp, Homo sapiens
ctcagagagggatcaatatgtccatgattatattctgttgcttggaataatcttgtgcccttctctaaaccaagtcacttgaggtctggggtagctggt

SEQ ID NO: 878892 - DNA, 98 bp, Homo sapiens
cactgtcagcagatgtcgaataaagctttgatgacagtagggaaagaaccatttcctaccatttacgtagattcacaaaaagaaaatgagaggtggaa

SEQ ID NO: 878893 - DNA, 98 bp, Homo sapiens
gaaaggagacctcattccaagttccaggattaattctggtattattctcactaaggttggttactatactattccatctatggatgaccttgctaaaa

SEQ ID NO: 878894 - DNA, 121 bp, Homo sapiens
agcacttcttctgctctcactgcggcagactggagacgctgaagtgggctcccccttgctcagtctttaattttttagctgtaggtccatcttcatggcttctgcaccaaacacctctccg

SEQ ID NO: 878895 - DNA, 99 bp, Homo sapiens
tttgggctacgctgctgattcctgcggccgcggtctacgaagaccaagtgggcaagtttgattgtgccctgtgggacatcgagaccggccagcagacga

SEQ ID NO: 878896 - DNA, 98 bp, Homo sapiens
ggcgccggggcagcagcgaccccacagtgcagcgctccgtgtttgcatcggtggacaaggtgccaggatgttcacggaagaccagggtgtagatgaca

SEQ ID NO: 878897 - DNA, 99 bp, Homo sapiens
aaacatggcggtggactcggcgatggagctgttatttttagatacttttaaacacccgagcgctgaggattcatctaattgatgagtttaataccgata

SEQ ID NO: 878898 - DNA, 129 bp, Homo sapiens
tgacacccaggcagggcctagggtgggacgatggcaggtgggggcagcgacctgagcaccaggaccaagccatatgtccttctatgttcgagcccacaaagggtcaacactttctcagtggtctcttgg

SEQ ID NO: 878899 - DNA, 99 bp, Homo sapiens
tgcttctgaacttcttaccacttggaccagttctctcgggtttgcacacccccactgtgggccggggaaccgggtcccggccttcgcagactccaggct

SEQ ID NO: 878900 - DNA, 99 bp, Homo sapiens
gggttttcttctttaaacaggcctgcataggaagacacgggggagatctgcagagggtagagctcgctcatgctgaccggctgctcgtcgctctcagtg

SEQ ID NO: 878901 - DNA, 99 bp, Homo sapiens
ttttcttcagaagaaggacttcggaatgcactacaacaggaaaatcatattatagatggagtaaaggaatgatgagaagacagcagctgattacaagat

SEQ ID NO: 878902 - DNA, 98 bp, Homo sapiens
attttcatttgcatgtcctacggagaaaaggagaacatcgtatgagcttgaaatccatggcccaaaatgactctaccagtggagactctcttctgtga

SEQ ID NO: 878903 - DNA, 99 bp, Homo sapiens
ccaggcccagccctttggcagcaaaaagctaaaccagccccagaaatatttgaaaatgaagtcatggccctgctgagagactttgctaaaaacaaaaac

SEQ ID NO: 878904 - DNA, 99 bp, Homo sapiens
cgagagaacaaaattaaacaactacctgctgaaattgagccagccccagtgcctgctgagccgtttgacaacactacctacaagaacctgcagcatcat

SEQ ID NO: 878905 - DNA, 99 bp, Homo sapiens
atttgttgaaaatttcaagcaggaacataaactccatgttctggagctccccagtgtcctcctccttcatcagctggctaaacaagaaggtgcatggac

SEQ ID NO: 878906 - DNA, 99 bp, Homo sapiens
tgaaaatgccccgtgccggggcgtccaccggagtcctgccagctgtccggcgctggggtgattttacaacgagatgctgctctccatagggatgctcat

SEQ ID NO: 878907 - DNA, 99 bp, Homo sapiens
tagagcaactgttgaactcagctgcctgtagggtagtggtggtgcacgaagatccgcactacttgacagcgacgagcccttggtgtatttctatgatga

SEQ ID NO: 878908 - DNA, 99 bp, Homo sapiens
ttcagtttgggaaatctggatgccaaacgagattggggccatgccaaggactatgtggagatgtggaattagaagaagctattagaagaagtcttgagg

SEQ ID NO: 878909 - DNA, 98 bp, Homo sapiens
acaggattcgttggctgccgtccccgctgctgtgcattggcaatggcaccagcatgatatcattgatcattcctcccaaagaccagatttcacgagtg

SEQ ID NO: 878910 - DNA, 99 bp, Homo sapiens
cccagatttgttgcattgatttggaggtaacttcttggtctcacatttagaccccgagttcttgaattgaccacttccagggagacgttctgaggcggg

SEQ ID NO: 878911 - DNA, 113 bp, Homo sapiens
cggccctggccccgggggcagtcgcgcctgtgaacgagccagccctcctccctggccatgctggaccttctgcacgtggctcgggacattgcctgtggctgtcagtatttgga

SEQ ID NO: 878912 - DNA, 100 bp, Homo sapiens
gcccgcaggtgctatgctgtgggccccgctcaggacacaggttgaacatcacggcggagaacgactgccggcggctgcactgctccctgagagacttgag

SEQ ID NO: 878913 - DNA, 99 bp, Homo sapiens
gccacgctcagcagcatcagacacatgatccgcaagaacaagtaccgccccgacctgcgcatgaaagtccagtatcccccctggagtcacattcgaaag

SEQ ID NO: 878914 - DNA, 99 bp, Homo sapiens
cttcaacacacccaaggtcacagagcagctcatgaaactggatgaacaagggcattcaacagaaggtgtcaaattgacagctctcaatgacagcagcct

SEQ ID NO: 878915 - DNA, 99 bp, Homo sapiens
tcctgtcactccacctcgaacagctaatccgccgaagaaaagcctacagacctggtacctggatttttgcccgagatgattcctaccaccttactactg

SEQ ID NO: 878916 - DNA, 98 bp, Homo sapiens
aaacatcttgatctggagaaaaactggatgttggtagaaaaagcaagagtttgttatatagcagatgaactgagtgatgttattgatattaaggatcc

SEQ ID NO: 878917 - DNA, 99 bp, Homo sapiens
atatgaagaaatggggaaagtcaagaaaatagatgcttctaaatctgttgatgaaagtggtgaaaccagaacaatatctcactttcattatactacctg

SEQ ID NO: 878918 - DNA, 99 bp, Homo sapiens
agatggcaaccccaagttgaccctgggtctgatctggaccattattttgcatttccaggtgctggagaatctggtaaaagcaccattgtgaagcagatg

SEQ ID NO: 878919 - DNA, 99 bp, Homo sapiens
gactcttccagttttgccatggtaacacttgtggggcattcctttttgaacagtacccattccctttcgtctctgagagatgttgagggcaccaaagtc

SEQ ID NO: 878920 - DNA, 98 bp, Homo sapiens
tgatgtgtgcaataatgaatcattagtatcggacacagaaactaatctatgccagcaattatgacaatgttagcagaccatgcagctcgtcagctgct

SEQ ID NO: 878921 - DNA, 100 bp, Homo sapiens
agctgatggcacacagcagttctttgtcccaggcatgaagaggcatatcttgaacaacaacctggctgcctgggacaaagaactgctgtgtgccatcagc

SEQ ID NO: 878922 - DNA, 98 bp, Homo sapiens
tcgagcagtgtgactaccccccactccccggggagcactactccgagaagtggaatggtgcccagcaaaagcagggagtctgtggcatctgaaggctc

SEQ ID NO: 878923 - DNA, 99 bp, Homo sapiens
caaaggggcctgtgtacttgctgtagatgaaaatgaacaactctgctcatggtgattacatgcaaaataacgagagcagcttaatagagcaagctccaa

SEQ ID NO: 878924 - DNA, 99 bp, Homo sapiens
cttcacccagaacctgttgtggggagtaagatgatatcatcaagttgaatcgaaaggaagggaagaagcagaattttccaagactaaatagaagactcc

SEQ ID NO: 878925 - DNA, 99 bp, Homo sapiens
ggtttccagcttcatccatgttcctaaagaaggggtgggttttgaaggtctgggtggtggtggcggtggcggacaaggtcctggtgctgcagctttcac

SEQ ID NO: 878926 - DNA, 99 bp, Homo sapiens
tttgaaacctcgtcattaattggacacagtgccagagtgtatgcactttactacaaagatggacttctctgtacaggcagttgcagtggtgcagaatgg

SEQ ID NO: 878927 - DNA, 99 bp, Homo sapiens
aggaatagacaatgactgaagctcagcaatactctgtctccgattttgagctctctttctcctttcttgattgagccagcctctgaaaggttggagata

SEQ ID NO: 878928 - DNA, 99 bp, Homo sapiens
tccagtcaggagcactggatgcaagtcggcaggtcctttctgaaatggtatctatgattcagctattcaaaacctaatgaagttggtgactatgacaat

SEQ ID NO: 878929 - DNA, 99 bp, Homo sapiens
cacatcatttggattaggtttactggcatcaactggaatctttacaccattgcattcttttggctgccctgctttactaaatcgatggcctgccaatat

SEQ ID NO: 878930 - DNA, 99 bp, Homo sapiens
ggtccatggtgctcagggccttgtccagggctttggtcacctgggccatattcttggtcacctgggcagggcttcttggccgactgagcagggacagaa

SEQ ID NO: 878931 - DNA, 99 bp, Homo sapiens
caccaccctctcagacatgggcaagaaggggggcagcactgaaatacttaccaacgatcgtcaacgatgtgaaattggtgtttgatcccaaagagctca

SEQ ID NO: 878932 - DNA, 99 bp, Homo sapiens
tggagaccagcagaactccaccagaggtcatgacgccagtcagatcacactagccttgggcacagctgcctcctaccccagggcctgccaggctctcgg

SEQ ID NO: 878933 - DNA, 99 bp, Homo sapiens
caagggttgtatcgaggctataaaagcacagttttaagagagcggagggtgcaggacgtcatcagcccgatcgtgtttgaagcagcctacagcctcagt

SEQ ID NO: 878934 - DNA, 99 bp, Homo sapiens
gacagtgttgagtttgattgaagcaataagagctaactgccatcaagagccatcagtatgtcttcaagctgcatgcccagaaagctggattggttttca

SEQ ID NO: 878935 - DNA, 103 bp, Homo sapiens
ctctcctccatgtcaacatagtccaggagattgtcagaaatggaggagggggcaccagatccaaggaagtgcccggacaaagccgggaggcgaggagagccga

SEQ ID NO: 878936 - DNA, 109 bp, Homo sapiens
acgctgcagtcgctgggcctgaccgggggcagcgccaccatcaggagatgctgaacataagccatatatctgtggggatgcagattctgcctccactgttctggatggg

SEQ ID NO: 878937 - DNA, 99 bp, Homo sapiens
cgacctatccagaatgatcaagattaattcatggaggacagatgttaaatggattggcaggtccaactgtaatgaatgcagcaccatttctctctacga

SEQ ID NO: 878938 - DNA, 99 bp, Homo sapiens
gaagagcagccaacatggcggcggaacgcggcgcggggcagcaacagtcgcaggagatgatggagggccactgacacagcaaaacaccagttgtgactt

SEQ ID NO: 878939 - DNA, 99 bp, Homo sapiens
taatgtgtgctgtgttaaattcagcccctcttccagataccatttggctttcggctgtgcagcgacgagtagaacagcccctctatggtttagatggca

SEQ ID NO: 878940 - DNA, 99 bp, Homo sapiens
atgtgtttcactgtgaggcacacagaattctctacatttgtgaaagtcagtttctgaggaatttcatcagttccagttcagacatcataagagatcttt

SEQ ID NO: 878941 - DNA, 98 bp, Homo sapiens
ttcttccaaagtgcccggacccaaaacaggaagtagtaaacctattgatggcaattttgctgactgtggaagtgactcatccaaactccatgccagct

SEQ ID NO: 878942 - DNA, 98 bp, Homo sapiens
tccatccagctccctgcgtcccggccttcgctgtgctccctcagttccaggaatggatggaggtgctttaactgatacaagtctcacagattcctatt

SEQ ID NO: 878943 - DNA, 99 bp, Homo sapiens
agcttgtgctgctgctgctgctgctgctgcatgtctaccaggagaggagggaactgcggagcggaaagctacatccatattggaattttaccgggaact

SEQ ID NO: 878944 - DNA, 99 bp, Homo sapiens
gcctcctgagtagctgggattacaggatgatggaccaacagcaagagacctgctagtacaatatgctacagggaagaaaagttccaaaaacaagaaaaa

SEQ ID NO: 878945 - DNA, 99 bp, Homo sapiens
ctcaatctcttcaaactcttcagactggtttatcatcagggtggatgtgacaattttcaccaggtgatatggatcggacacaaattgagcttaatccgt

SEQ ID NO: 878946 - DNA, 98 bp, Homo sapiens
cccagttttgctgaccttattcaccatgacttatcagttagtgtgactctggatccagatacagctcatcacgaactaattctctctgaggatcggag

SEQ ID NO: 878947 - DNA, 99 bp, Homo sapiens
gcgattactgcaatctttgaccagttactggagtttgttactgaaggatcacattttgttgaagacttaattcagtgcacaaatgagatgaatgtgaac

SEQ ID NO: 878948 - DNA, 98 bp, Homo sapiens
cagggatgaagtagttttaattgactcgagttgtcttttagaaacactagaaacatatctgcgaaaacacagttggaggtccccctccccactaagtg

SEQ ID NO: 878949 - DNA, 99 bp, Homo sapiens
aattgagagaaatcagacaaaactggatcaatgtcaaaaattttcccagcagtactctactattgtaaaggtgaaatgtgaccattactggccattcac

SEQ ID NO: 878950 - DNA, 98 bp, Homo sapiens
gcgggcaccgaggactccgctcctgcccaggcacatctccctaacacttcctgccaccttccgaggcaggaacagcacccggacggactacgagtacc

SEQ ID NO: 878951 - DNA, 99 bp, Homo sapiens
catcccagcagatctccagggttctaggaaagggtcacttagttctgtaacgccatctcccaccccagagaacgagaatcccaaaattcttctcctaga

SEQ ID NO: 878952 - DNA, 98 bp, Homo sapiens
ctatgaccagcaagaggatggggccctggatgagggggaagggcctcaaagccagaagcttagcagtgtctgcaaaaacgaatcttttcctacaacct

SEQ ID NO: 878953 - DNA, 99 bp, Homo sapiens
ctggacctatgaatatccagtttgagccatcggatctaagatccaaaaggaaacagtgacatttaattcttctcttctgaggccccgtgtgattggaga

SEQ ID NO: 878954 - DNA, 99 bp, Homo sapiens
atctacaacccgcgcttctggccgcgggaaggagagccttatgtttgatcatcggccaaggtcctggcgagaactgcctctgcggctagctgattttgg

SEQ ID NO: 878955 - DNA, 99 bp, Homo sapiens
agacacagagaaccttgctcttcatatcagcatggaattggctattcatcatggctggagacttcctgaatataccctttcccaggagggaggacctgc

SEQ ID NO: 878956 - DNA, 99 bp, Homo sapiens
aagttttgtgcagattgccagtctaaaggaaattatctcattcaaagctagtgcaactttatggagtctgtatacagcggaagcccctttacattgtga

SEQ ID NO: 878957 - DNA, 100 bp, Homo sapiens
cccccatttcttctgagaaggacagagccaatctactcctcctgggttagcataacccaggaggagtagattggctctgtccttctcagaagaaatgggg

SEQ ID NO: 878958 - DNA, 99 bp, Homo sapiens
ctacgtcttctctgcattttgtccacatgagaggattacctttccaagccaatgcccaagacattataaacatgctgttgcatgaaaaagcagaagccc

SEQ ID NO: 878959 - DNA, 99 bp, Homo sapiens
tggggcaagggcatggccgagaacaccagccacaagtcctaccggccgctctgcgtcctcaccttcaagcttcactgtataaataggagaggatgagag

SEQ ID NO: 878960 - DNA, 99 bp, Homo sapiens
tgccaatggtggagaagaaaacttcggattgtcttgccagctgtgtttgtctgcattgcccttgtgttcagcctgatcgtgccaccctttggcaagtac

SEQ ID NO: 878961 - DNA, 98 bp, Homo sapiens
ggagtgagaagcaagaaggccctggacacagcaatatctctgggctttcacaggtttgttggagactgaaccgttgcaaggaacagacgaagatgcag

SEQ ID NO: 878962 - DNA, 99 bp, Homo sapiens
cgctccggaggaaacggagcgctgccctgcagcccgagcccatcaaggtgtacggacagggcaatgacatcattgcagcagccaagcgcatggctctgc

SEQ ID NO: 878963 - DNA, 99 bp, Homo sapiens
cagcaagaacagagagagaggtggacagatctgagagatactgagtttgcagtgttgatgtgggtatttacctatgttggtgccttgtttaatggtctg

SEQ ID NO: 878964 - DNA, 99 bp, Homo sapiens
ccaagactcagtataaccaagtaccaagtgaagactttgaacgcactcctcagagtccgactctcccacctgctaagacggagtctcggtctgtcaccc

SEQ ID NO: 878965 - DNA, 134 bp, Homo sapiens
cctgcgcccgggctggcaagatggccacgcccccagcagagacggcgcctctacggcaagcaatttaacactagccatagccatggcgcttataatctcggtccccgatggtgtcctagaggcgccgtctctgc

SEQ ID NO: 878966 - DNA, 99 bp, Homo sapiens
ataatagtgaaagtgaatctgtgccatcgaagctcttcctgccatgatgcagtgggtccgcacgcagaagccaggagagagtggcatcaatattgtcac

SEQ ID NO: 878967 - DNA, 99 bp, Homo sapiens
tgggcttctctgaggcggcgagagatggtcaggtctggagctcgaccgggccagatgggcactctggttttttaaaaatgataaaagcaaaacttggca

SEQ ID NO: 878968 - DNA, 99 bp, Homo sapiens
aggtgtatccaacagcctctaatatggagtatatggatagagggaggaatcagcagcttggaaattcaagcacgtgatctggcgggatgggcgtttgcc

SEQ ID NO: 878969 - DNA, 98 bp, Homo sapiens
gagagaaacaggcctccttggagaccagctactacttttcagcatccttatgtgagaaaatatttacaccagcagctccagttcataccaataaagaa

SEQ ID NO: 878970 - DNA, 99 bp, Homo sapiens
gcagagttggatcttcaaactgaaccacccttcagcaaggatcatgctcagttaagcaggtatgttgagtctaaaaaggacagagtcacagtagtcttc

SEQ ID NO: 878971 - DNA, 99 bp, Homo sapiens
aacaaaatgaagaaaacccaggagatgagggcaagaaagtgaaggggggctccagcaagctgacaggccgtgtccttgctctgtcctttgatgcccctg

SEQ ID NO: 878972 - DNA, 99 bp, Homo sapiens
caaggcagccatagttcacaatgttgattctgatgacctcattagcatgggatccaacgacagtaagtacagtgggcctttggagtgacgctgtgggaa

SEQ ID NO: 878973 - DNA, 99 bp, Homo sapiens
atgctacactcaggcaccctggtgcccagccgggaactccccatcgcgttttgccagcgataatacgcctcaggttcaaaccttgtactactcagctga

SEQ ID NO: 878974 - DNA, 98 bp, Homo sapiens
gcagctcggaagactcagatgccgaaaactcgttggagattgagttcaaggagacccaagcactagtattggcccccaccagagaactggctcaacag

SEQ ID NO: 878975 - DNA, 99 bp, Homo sapiens
tttctataagaactccttgttccgacatcccaaacagatttgttattgggcgggaaaaaccaggacaagtgagcgaggttgcccagttgataagccaga

SEQ ID NO: 878976 - DNA, 99 bp, Homo sapiens
caccaagcttatttgtctcattgggccagctctgtaagtaccatgagaatacgttctttttacctccagcctctctggcaggggctcattctgcaggat

SEQ ID NO: 878977 - DNA, 99 bp, Homo sapiens
gctactcctccacaaactccagtgacagcagaaaaccatgagctgttttccaagagcttcatctccatggaagtgcctgtcatggtagtaaatggcaag

SEQ ID NO: 878978 - DNA, 98 bp, Homo sapiens
tcgcccgccaccctgcgctgccgccgctctgaggagttaaagtaacattgagcagttttgctgttatttcaaagaactgcccgccgtggagttaagga

SEQ ID NO: 878979 - DNA, 98 bp, Homo sapiens
aagaaatgagagatgagctacatgtccgaggtgacgcagtaaaacgcaggactcttcccgcttggattcgcgaaggtcttgaaaaaatggaacgtgaa

SEQ ID NO: 878980 - DNA, 100 bp, Homo sapiens
ataaggagaaggataaaatgaaagccaagaagggaatgctgaagtgtctcccaagcccttcagcattcccttcttggctttcattttatccttctcctta

SEQ ID NO: 878981 - DNA, 99 bp, Homo sapiens
gggtggagcccccagcggaggaggagctctcaaaagatactctcactctgttgcaaggctggcaaaccgtggcacaatcatggctcaccacatcttgga

SEQ ID NO: 878982 - DNA, 75 bp, Homo sapiens
tcaaacaaatttgcaaatgatatacaacttctaagcatcaggtattatctactgctgtctgcagaattcagacat

SEQ ID NO: 878983 - DNA, 99 bp, Homo sapiens
ggagtctgcgaaggccgggacccggttccccggcccacagtgggggtgtgcaaacccgagagaactggggaatgtggtgagcaacttgggacattcctt

SEQ ID NO: 878984 - DNA, 98 bp, Homo sapiens
aggaaacttgcagcaaagccattcgggttggagtaattggcagtgctcggaatgtgaccaggcagggagcagtgacatggaagcagatatggccatgg

SEQ ID NO: 878985 - DNA, 99 bp, Homo sapiens
ggcctcccggctcgacaagttcaagcagctgcttgccggccccaacacggaccttgatcatgacaagatgtttaagatgagtgaaaagatattactcct

SEQ ID NO: 878986 - DNA, 99 bp, Homo sapiens
tggaggaaaggttcgccctggtgctgtgctgaagctgctgaaagatggcagaagaagtggtggtagtagccaaatttgattatgtggcccaacaagaac

SEQ ID NO: 878987 - DNA, 99 bp, Homo sapiens
tctacacgatgagatgcttcattggtttcgtgcagtagaatgttgtgtgagcaatgactcagatgcatataaagatcaaatatcagtactgccaaatga

SEQ ID NO: 878988 - DNA, 99 bp, Homo sapiens
ctctggagtagctgggattacagattgcattcatggcttctctggcaacccacttcagcaatcagaacagtgggattatcttcagcagtgttgagacca

SEQ ID NO: 878989 - DNA, 99 bp, Homo sapiens
agacccgtctgcagccctggatctattaaagggagcattccgatcatctgaggaacagcagggtcatcacactgaaacggtgttcaaccgggttttgcc

SEQ ID NO: 878990 - DNA, 98 bp, Homo sapiens
gcgaggcagggccagcagcaggcgggaggctgtgtgaggcattgtgtaatcagccaggctctttcccgaccattgttctccaccaacaggcctggaag

SEQ ID NO: 878991 - DNA, 98 bp, Homo sapiens
tacagtcaaggaggcggcaaaaaaaaagtctgctactactacgacgattgagaggatccagaatccagatctctggaatagctaccaggcaaagaaaa

SEQ ID NO: 878992 - DNA, 98 bp, Homo sapiens
tgggtcagtccgccgctcaccccgcggccgcaccttcccgccttctcaggaatctggtggacagtaacaaactttggtgaaatttcaggaaccatagc

SEQ ID NO: 878993 - DNA, 99 bp, Homo sapiens
gtgaaccaccccccgtggataggaacctcaagccagacagaaaagctcagcaaaacccagcagctcagattcctgccaggcagcgggagattgaaatga

SEQ ID NO: 878994 - DNA, 99 bp, Homo sapiens
aggacccagcgaaaacagcagaagctttggacaaagacggctggttacacacaggggacattggaaaatggttaccatagagacggggtttcatcgtgt

SEQ ID NO: 878995 - DNA, 99 bp, Homo sapiens
gaacatgggtgcacccctgggagtgggcctgggtctcgtctttgtgtcctcattgggaaattcacagtatggccaacagcaagatgcataccagggacc

SEQ ID NO: 878996 - DNA, 99 bp, Homo sapiens
aaattattcttgatgatgatgagtgtcctttacaaatcttcagggaatggccaagtgacaaagctctgcaagatttgaagggtcccttaatatggacct

SEQ ID NO: 878997 - DNA, 99 bp, Homo sapiens
gcctcctgaggagctgggactacagagatggggtctcactctgtcatccaggctggaatatagtggcacaatcatagcccattgtagcctccatctcaa

SEQ ID NO: 878998 - DNA, 99 bp, Homo sapiens
ttgtctataatatacttgacatttttgtacatgttttgatcatctcgattgctatatggttctatgtgaaaagtaaccacgaagatggccagagcccct

SEQ ID NO: 878999 - DNA, 99 bp, Homo sapiens
ccctgctcagcttctagcaacaattttgcaaggcagatccagcgccggtgacacttggacagaaacactggcctatgtgctcttctggggagttgcaag

SEQ ID NO: 879000 - DNA, 99 bp, Homo sapiens
aacaatcattagttcagtgcagtgtctgacttgtgacaggttctttattggtgaaaacatgaatccagatggcatggttgctctattggactaccgtga

SEQ ID NO: 879001 - DNA, 99 bp, Homo sapiens
ccgaacttgcgacaagttgccggagccgcggggcgcgggcggcggacagattgaccttcagagcgagaggcatttcatccttcatgaagccattcagga

SEQ ID NO: 879002 - DNA, 137 bp, Homo sapiens
cctgggctccggtctcaccatcctgtcccagccgctcatgtacgtgaaagtgctcatccagctgagatgccgcggcagtttcccaagctgaacatctctgaagtggatgagcaagtccggctcctggcggagaaggt

SEQ ID NO: 879003 - DNA, 99 bp, Homo sapiens
acagcgagagcgtgccaggcgtgtactgcctatgtgtgctatatttgatcctgatgacctttattcaggggtcaatttctccaaggtactgagtactct

SEQ ID NO: 879004 - DNA, 99 bp, Homo sapiens
gccagcccgtcaagaactcaggccacagtggcttggccaatggcacaggtccaagacaagctgctgctatctgcgtgccacttactggtctcactggcc

SEQ ID NO: 879005 - DNA, 99 bp, Homo sapiens
actcgtatccctccacacatgatcatcagtatttgcctcctgtgtcccaaccggcctgagtcaaggatggagccccccaaacagaaattatcaatgctc

SEQ ID NO: 879006 - DNA, 99 bp, Homo sapiens
gtctcctgtgtggcgatggtcttcctgctggggctcatgtttgaggcagaactggggctcccttgcatcttccagttacaaattcagtgccttctgcag

SEQ ID NO: 879007 - DNA, 99 bp, Homo sapiens
ctctgccgtgccacctgctgcacccacgaatctgcccacccctcctgtaacccagcctgtttcacttcttggatatatgattggatgcctgaacaacca

SEQ ID NO: 879008 - DNA, 99 bp, Homo sapiens
aggaatttataccagctgtagcaaaagtgggaagccaagcctttcctcccgagtgaagatagtccaagtcctaagagacagcgcctctctcattcagtc

SEQ ID NO: 879009 - DNA, 99 bp, Homo sapiens
attggaccgacgcagccatggatgacagcatggaagagaaaccactaaaagtgaaaggaaaggactcttcagagaagaaacggaaacggaagctagaaa

SEQ ID NO: 879010 - DNA, 98 bp, Homo sapiens
ttgttcaagattgtggatttgagcatcttgttcctgtaatagaaatgtgggcagatcaactgacatccttaaaggatggctggctgtggtgaaattga

SEQ ID NO: 879011 - DNA, 98 bp, Homo sapiens
atgaacccaacctagtgggtgtaatacatcatgaactgcagggtacaccagaggatcgcttcctggcagaatttgggagctgtttattgcagcactgt

SEQ ID NO: 879012 - DNA, 99 bp, Homo sapiens
agaaattctggaacacctatatgttttcggctttgtgagaaaccttaccatcaaacacgatggccagcaacgttaccaacaagacagatcctcgctcca

SEQ ID NO: 879013 - DNA, 98 bp, Homo sapiens
ggggaaatggtacacagcctgttctctctggaacgggagaagaaactgttaggctagattgttcagattccattctgtggggaaattgactgtgagga

SEQ ID NO: 879014 - DNA, 99 bp, Homo sapiens
gaggcacccctcgctgctgctgcttctagtgctgctgctgtggctgctgcagatccgatcacataggacagtatgcaccttaagatcctgaagaaacgg

SEQ ID NO: 879015 - DNA, 99 bp, Homo sapiens
gggaattgcctgaacctttgatgacttttaatctgtatgaagaatggacacaagttgcaaggtgtgggcagaagaaaaagctagtgatcaacagtggca

SEQ ID NO: 879016 - DNA, 99 bp, Homo sapiens
caactgaaattagtaaaacagaattctctttctccagggttccttgaaaagaaaacaggtagttaacctatctcctgccaacagcaagcgacccaatgg

SEQ ID NO: 879017 - DNA, 99 bp, Homo sapiens
gtcggcagcaagaacagagagagaggtggacagatctgagagatactgagaaatcaagatgactaccagctggttcgaaaattaggccgaggtaaatac

SEQ ID NO: 879018 - DNA, 99 bp, Homo sapiens
tctctctctctgcttcagctacctctgctcgaccctcatagtaggttagcatggactttgtaagtacaaaaagtctctctttgtagtttaagggcgatg

SEQ ID NO: 879019 - DNA, 98 bp, Homo sapiens
gcggtggtgaggcaggctcgcctcctccagctgttgttgctgctggcctataatgaggaaatttctgtctgaccaatatcaggggcacatcagctgct

SEQ ID NO: 879020 - DNA, 99 bp, Homo sapiens
caggatctatttgtaaaggccagcagcttgtgatgatgccaaacaaggttatcaatactctggctgaccatcatcatcgtgggactgactttggtggaa

SEQ ID NO: 879021 - DNA, 99 bp, Homo sapiens
gcagtcggcttctctacgcagaacccgggagtaggagactcagaatcgaatctcttctccctccccttcttgatgctgcacttaaaaggatgcttgttt

SEQ ID NO: 879022 - DNA, 99 bp, Homo sapiens
agtgatgagaagctgtcggagcttcccaagcatttttgaaacgttggggttgttggagtggttggattttccctggaattgagtgagaaattcagaaga

SEQ ID NO: 879023 - DNA, 99 bp, Homo sapiens
tcacctttgggactggaacaagacttcaggtcacgctcgctgcttcattgagagaatcagaccagcagagagagagagttatatgacaaaatatgctga

SEQ ID NO: 879024 - DNA, 99 bp, Homo sapiens
agggtctgcacgaaataaagctcctgggcaaggggacgtctgcagctgaaatcgcctaccagaggaatgacgatgatgaagaggaggcagcccgggaac

SEQ ID NO: 879025 - DNA, 99 bp, Homo sapiens
ctgggcaacagagtgagactgctggatgtcaatggtgaccgacgtctcctttcctccggggatggctttgttggtggcacgacacacgatgctctggcc

SEQ ID NO: 879026 - DNA, 99 bp, Homo sapiens
tttgacgccgagagctacacgttcacggtgccccggcgccacctggagagaggccgcgtcctgggcagaggtcagcccaaggccaaccccactgtcact

SEQ ID NO: 879027 - DNA, 99 bp, Homo sapiens
ataattcagatggagaatatatggctggacagctagctgcttatggctataaaattacagccaacaaatggaattttcttgagcatgtttctaatcgtt

SEQ ID NO: 879028 - DNA, 100 bp, Homo sapiens
aacttcttgataataatttacaatgaatggacacagtgatgaagaaagtgttagattcttcatcactgtgtccattcattgtaaattattatcaagaagt

SEQ ID NO: 879029 - DNA, 99 bp, Homo sapiens
aagaaaaagaaggccctgagtcaaagaagatgcctcgaactaaacaaattcatcccagaaatctaagagattcagtaagctgtgaggtccgtaatgtca

SEQ ID NO: 879030 - DNA, 99 bp, Homo sapiens
ctcaagaggaacggcacatgacccaggcctatgccaatcagcatttcacattcctcatggttggttcaaaggacacagagtctgggatctaataattca

SEQ ID NO: 879031 - DNA, 99 bp, Homo sapiens
cagcagtgatggggagagccatagcggtgaaaggtgtagcagtcactcggcctacacccacagcatcgaccttgtgaacccagcgacctgactgccttg

SEQ ID NO: 879032 - DNA, 99 bp, Homo sapiens
aagactgttgagtatgctccatgtagatcacatgagaccccgctttctacaccaaccgcaagagacagccttgacaaactctctctaactgggcatgga

SEQ ID NO: 879033 - DNA, 99 bp, Homo sapiens
aagtggacaaagagaggagtcaggagtgggaatagctttgcgaaaaatgggcgcaatggccaagccagattgtatcatcacttgtgatggtaaaaacct

SEQ ID NO: 879034 - DNA, 98 bp, Homo sapiens
aggtgccagacaaacctctccaccctcagtgacccggtgcagctagaagtccatatcggtgtctgacttccagcaactgctggcctgtgccagggtgc

SEQ ID NO: 879035 - DNA, 99 bp, Homo sapiens
gcccaagaaacatctcaccaatttcaaatctggttctcccatgggcaggtggtctctctggatgagctgcgccccttccaggacccagacctgagctcc

SEQ ID NO: 879036 - DNA, 99 bp, Homo sapiens
ggggatagtggagctgcccactctagaggagctgaaagtagatgaggagcagcagccaagctggacagatgacctgcctctctgccacctctctggggt

SEQ ID NO: 879037 - DNA, 99 bp, Homo sapiens
agccaatgtcaatgcacaatctcaggccacactggtgtgtctcataagtgacttctacccgggagccgtgacagtggcctggaaggcagatagcagccc

SEQ ID NO: 879038 - DNA, 99 bp, Homo sapiens
tgctggaatgcagcaggagacaaagttggagccagtgcatcagatggttcaagatccgcacgcagctggtggagcagttcaaatgtctggagcagcaat

SEQ ID NO: 879039 - DNA, 99 bp, Homo sapiens
ttcccccgagggtcaacgagaaagagatcgttcacagaagaaaagcttggccaggctgagaagacagaattggatgctcacttagagaacctccttagc

SEQ ID NO: 879040 - DNA, 99 bp, Homo sapiens
ctcccacgcacaggtggccaagaagaaccagctggtgatcatgttgatcggaactctaatgatccaggacaaagaagttaccctggagtatgtatcaag

SEQ ID NO: 879041 - DNA, 99 bp, Homo sapiens
cggagatgtttccaaaggactggactgttatgcgcttggttgctaacaatctggctcttgctgattgaattcctttggtgcagtttagcatgttcctct

SEQ ID NO: 879042 - DNA, 99 bp, Homo sapiens
cagtgaactctatagattctgctggtatacagctacatccaggagagaatgctgacagtcctgcagatttatcagcaagactgttgaacgcataactgc

SEQ ID NO: 879043 - DNA, 115 bp, Homo sapiens
aagtataggctgaggctacctgtgaacagtacgcagtgaatgttaacccttaggagaaatcttgagagtggacagcaattgtgaagatcgccagagagttctgtgtttcatcacc

SEQ ID NO: 879044 - DNA, 98 bp, Homo sapiens
gggcagcggctgccgcgcctgtctgcccgagggagatcttcaacttgctgctgagcttgggaagacattactggatcggaacacagagttggaggact

SEQ ID NO: 879045 - DNA, 99 bp, Homo sapiens
gaaccatttgtctttagtcttggcaaagcctcaagcccttctcaggatgcgcaggatgccaggcggccacggagcaggaacccctccgcctggactgtg

SEQ ID NO: 879046 - DNA, 99 bp, Homo sapiens
tttgccaatgttggagccgtctgcaaagtgtccccggcaagaaggtaaaaagaacgtattctcatggtacttacagagctggcccaatgagacaaataa

SEQ ID NO: 879047 - DNA, 99 bp, Homo sapiens
tcgcttttcccctggccttctgtatcttcatggtgcggctcatcttcgagagggtcctgatgaagaagctgttgtggatcttggcaaaactagctcaac

SEQ ID NO: 879048 - DNA, 99 bp, Homo sapiens
gagggaatgatccttactaaccacgaccatcaaatccgtgtcggagtccttacaggccaaatttgagtccctctttaggacgtatgacaaggacatcac

SEQ ID NO: 879049 - DNA, 99 bp, Homo sapiens
gccgaagaagcatcgttaaagtctctcttcaccctgccgtcatgtctaagtcagaggttttcctttggaatatggataaatacaccatgatacggaaac

SEQ ID NO: 879050 - DNA, 99 bp, Homo sapiens
gcacagagactgactgaatggctccaattatcaggatttgaaaacccagtatcagaatctaccactttgtgagttgtaagacgttcatcgccgtgttat

SEQ ID NO: 879051 - DNA, 99 bp, Homo sapiens
gccatcgtggccttggctgtctgtgcggccctacatgcctcagaaggggcggagaaactcatcatccacctgcggaaacatggcatcccctttgcactg

SEQ ID NO: 879052 - DNA, 99 bp, Homo sapiens
ctttagaagtgcggtttactcctcatgccgagatggaccttgggcagctcagttcacaagataaccatgatgactacacagacttctactatgacattt

SEQ ID NO: 879053 - DNA, 98 bp, Homo sapiens
gagcagaagggaggctccaagacctcatcaacaattaaggggtaccaggatgttcgggatcggatgatccatcggtccacgagccagggctccatcaa

SEQ ID NO: 879054 - DNA, 99 bp, Homo sapiens
tgagtttcccacttgattacccgttaagtcccccaaagatgagatttacctgtgagatgtttcatcccaacagtctgggcagatcacacattgcttccc

SEQ ID NO: 879055 - DNA, 99 bp, Homo sapiens
ccaactctgaggagtccactgcagcaggccagctacagatgcatgcatattgtgaaaacccagatatagtgctgtgtggaaacaagagtgatctggagg

SEQ ID NO: 879056 - DNA, 117 bp, Homo sapiens
taggaacagctccggtctacagctcccagcgtgagcgacgcagaagacgggtgatttctgcatttccatctgagctgtctccgttatgaggtacagcgcctctgcttttgggtttgc

SEQ ID NO: 879057 - DNA, 99 bp, Homo sapiens
ctctgtccaggcagcattaaaacttaagcagataacgaaggaggcccaacttcattcaataaggagcctgacggatttatcccagacggtagaacaaaa

SEQ ID NO: 879058 - DNA, 99 bp, Homo sapiens
gaagagggtctggaggagccttctcaagaacagagctgaccctctggtgggcagcatcgccacacagtacatgaccaacagagcagagcatgaccggat

SEQ ID NO: 879059 - DNA, 99 bp, Homo sapiens
tacagccatgatgaaagctcagtttatgagtctctgggatggattggatactgatcacagctgccagcaggtggctacccaggctactgctaagactcg

SEQ ID NO: 879060 - DNA, 123 bp, Homo sapiens
tatcatcaatcttattccactgcatgtatttgtgttgttactgatgcagagatacagcaaaagagtctacataggcagcaacatcacagatgctttcctaagccagaggaagtgtgagcccaa

SEQ ID NO: 879061 - DNA, 98 bp, Homo sapiens
tgacattgagatggcttgggccatgagagcaatgcagcatgctgaagtctattacaagaagtggtccaaaggcaaagttcgggacaagctcaataact

SEQ ID NO: 879062 - DNA, 99 bp, Homo sapiens
ttaataacatgtttggaacgagctagccattatttgaagacagaatacaggtaccaggtcatcagtacaccatctgatattttcatggtgatggaatat

SEQ ID NO: 879063 - DNA, 99 bp, Homo sapiens
gtcacaaaaagaatttcgtcagtctggaaggggagttttacttacgtaaatggatgtagaccagactcaagcatgagaaaatatggagaagtcttgtgc

SEQ ID NO: 879064 - DNA, 99 bp, Homo sapiens
acgaaattgaaattacctccgagggaaacaagaaaacatcaaagaggtctagcaaagtgcactggtgattgctgcggtgtttgaccgagacataaactg

SEQ ID NO: 879065 - DNA, 99 bp, Homo sapiens
gggaggaggggcatggagccgccgcgggcctgctgagctccggagcgcggcagccggcggcacggatgctgtatgattatgttgaaaggaaacgaaaag

SEQ ID NO: 879066 - DNA, 119 bp, Homo sapiens
cttcattcagatgtggtggaatatgccaaggaaaaactggagagcttcatcaaatctgtagagaattatcaaagctatcactatttttgatgaagctctccagtttttccttggcatat

SEQ ID NO: 879067 - DNA, 99 bp, Homo sapiens
tggttgttccgttgcgagctgcagctgcgatctctgtggtaggcccagtgcaagcatctcttggcagtttacctgagtcaggttatgaggacctgtcag

SEQ ID NO: 879068 - DNA, 99 bp, Homo sapiens
agacaagtttgtacatccaaaatgtgacatttgttgtgtcacctttcgaacacatcgaggactgctgcgtcacaacgcgcttgtccacaaacaacttcc

SEQ ID NO: 879069 - DNA, 99 bp, Homo sapiens
ccgcttagtcatcacatcatttcactgtggatatacgccatttctcacagagagatgctctgtctctgcagtttgaaccagtactactacctacttcta

SEQ ID NO: 879070 - DNA, 98 bp, Homo sapiens
actcatttgcaacttatatcgccagtccagcagctaaggatattttgtgcaggtgaatcttggaagcaaccagtaccttttctctgtcatagtggatc

SEQ ID NO: 879071 - DNA, 99 bp, Homo sapiens
cgccgccgccgccgccaccatgccagcacaggccagccagaagatgacactgagactacaggtttggaaggcggcgttgccatgccaggtgccgaagat

SEQ ID NO: 879072 - DNA, 99 bp, Homo sapiens
ccctttggacatgagaatggatggtggcagtctaacaggcaaccagccaagttgaaccttctcacctgccaagtaaaacctaatgccgaagacaaaaaa

SEQ ID NO: 879073 - DNA, 126 bp, Homo sapiens
tgctcggagatcatttgggagatccaagagattcagtatcactcgctccacatccatccctgctactttcttcattgactccaccatttctcaagatcatcaagggagcgagtgatactgaatctc

SEQ ID NO: 879074 - DNA, 99 bp, Homo sapiens
cttggtttgacactaaaaattgtcttggtgatcaaaaactcgtggaaagacttcatgcagttactattcgagcttcacttggacctctccagtcaaaat

SEQ ID NO: 879075 - DNA, 99 bp, Homo sapiens
ttgaagtatttggctgaggagttttcaatcccaacctagaggatcaagacataatgggagcatttttagacaagccaaagatggaaaagcataatgccc

SEQ ID NO: 879076 - DNA, 99 bp, Homo sapiens
tgtgcccgagaaatacacctgttatgtttgccaagaccctccaggtactcagaccccacgcagtggacggccttcctgggcttgcacgaccagagccag

SEQ ID NO: 879077 - DNA, 99 bp, Homo sapiens
ggacgaaggggactcggatgaagacaccaactctacaacattacctgtcatatactgaagaatctcttcttccagttatgcagcacctggctaagaatg

SEQ ID NO: 879078 - DNA, 98 bp, Homo sapiens
gaaatgaagcaaaccattgccaagcaggaagaggacctggaaaccatgaccatcctcagggctcagtgtaaggcaaacattggtgggcaccgatcttc

SEQ ID NO: 879079 - DNA, 99 bp, Homo sapiens
cgaaccgcagtatcatgctggccaagaagatcatcattaaggacggaggcacggatttccatttaaacagggttaatttggaagaatcttcaggagtgg

SEQ ID NO: 879080 - DNA, 98 bp, Homo sapiens
gttggtgtagaagccaaaatcagtgccggtggtggtgtgcacattgagccccggtatagacagttcccccagctgaccagatcccaggtgttccagag

SEQ ID NO: 879081 - DNA, 99 bp, Homo sapiens
caggatttggtttcagcatgtccttctctgaatgatgaatacttttactactgtgacaacattaacgaaagaatcttcaagagggagacatagggaaaa

SEQ ID NO: 879082 - DNA, 99 bp, Homo sapiens
gaggaggaaaaccttgagaccctgagactttcagaaacttattcacagttaccaaagctgatgccacaccacatgaagcccttgccatattacagctat

SEQ ID NO: 879083 - DNA, 99 bp, Homo sapiens
gccagaggaagctggaggcgctgatccgagaccctcgctcccccatcaacgtggagagcttgctgagtccggcagcgtcttctcttgagggagcaattt

SEQ ID NO: 879084 - DNA, 99 bp, Homo sapiens
catgcagccacaagtggtgaacaccttgtagccggcatccatggcctggctcatgagagaagtggagatcctgatgtttctcagtgccattgtgatgat

SEQ ID NO: 879085 - DNA, 99 bp, Homo sapiens
ccgggatcttgatgggcgtggcagggttggaagagctggcctcgcctttcggctcctttcttttccaagctcctcgaaaagctgatactcgtccgtgaa

SEQ ID NO: 879086 - DNA, 99 bp, Homo sapiens
aaggcatgactgcagccaccgcgaagatgttagcattgcctgctaccctggcggcgagggacacaggctctctctggcgggtccatatggaatatttgc

SEQ ID NO: 879087 - DNA, 98 bp, Homo sapiens
tagtcttttatgtggagctctgaatttaattcgaggctttcatgctatagaaagtctcctgcagtggaagcatcagttcacagcagtaatgcacactg

SEQ ID NO: 879088 - DNA, 99 bp, Homo sapiens
taactcctccataaaaacaagtgtgtgcatctggctgttagaagaattcatgctcatccgggtgcagattcactttataggaacagcttcagcttcagt

SEQ ID NO: 879089 - DNA, 99 bp, Homo sapiens
tggacttctacccctccgccctgcatccctcagtggtgaaatagggccttctaaacctgtggagaagtgagagatctgaatttggagaggacatgggga

SEQ ID NO: 879090 - DNA, 99 bp, Homo sapiens
gaagaagagaccatccatatttccagctgtgatgcagatccatccgccctagcaaaatatgttctggctttggtaaagaaagacaaaagtgaaaaagag

SEQ ID NO: 879091 - DNA, 99 bp, Homo sapiens
aggagtgctgagcccgcggaaccgcagccatgcacttgcacctcctgcgccgccgccccccatccaaggatatgccttcaagcctccacctagacccga

SEQ ID NO: 879092 - DNA, 98 bp, Homo sapiens
tggaatatgaagagacacagtatggtagccacacccccaggtcattacacctactctgagaatcgtgtggaaaaagacggcctgattcttacaagccg

SEQ ID NO: 879093 - DNA, 99 bp, Homo sapiens
ccggagaatggcagacgacaataagctcttcagggaggaattcaacatgagtaacgaaagaggctttgaaaatgtagaactgggagtcataggaaaaaa

SEQ ID NO: 879094 - DNA, 99 bp, Homo sapiens
tgtgccaggcatcaaaggagaccggggagagcctggaccgaggggtcaggacggcaacccggtgccagcccccaggccccaagaggagctggtccccag

SEQ ID NO: 879095 - DNA, 99 bp, Homo sapiens
ggacagcgcagaccgccagcgcatgcaggactgccagcgggagctccagagcctgctggtggaggagcatttgaagacatgctggagaacccactgaac

SEQ ID NO: 879096 - DNA, 99 bp, Homo sapiens
agcaaagtttagtttagtctgtgaggaaactggcggctgctggtagttccatgctgtctgttcagacttcagcttggtggtctcattctgttgcccagg

SEQ ID NO: 879097 - DNA, 99 bp, Homo sapiens
gtctttaataggcccaggatagagaccttgcagaaagaaaaagtgaaaggagttaccaatcagactggacttaagggtctcactgtcacccaggctgga

SEQ ID NO: 879098 - DNA, 99 bp, Homo sapiens
tcaacttgctgggccggtgcaactattcgcagtccgagcgtgaagctgtggtctaccaatctagacaactcagtggcaagcattgaggcaaaggctaat

SEQ ID NO: 879099 - DNA, 99 bp, Homo sapiens
aggagccaaaccctgcatctatgagggtaaaggatgctgctgaagccaccctaacatgtttaatgacagaatggcgtttttctcgaggagtacaagaac

SEQ ID NO: 879100 - DNA, 99 bp, Homo sapiens
atcgcaaccaccgccctggccatctaccatgtgactttgtgtggacagtaatgacctcacgtttccgattgcctgctggcagaacctacaatgtacgag

SEQ ID NO: 879101 - DNA, 98 bp, Homo sapiens
gtcaacgggcgggtgctggagctgttccgggccgcgcagctgccgaacgacgtggtcctacaggtaatatttgaagctgaagtctcaggagggagaag

SEQ ID NO: 879102 - DNA, 99 bp, Homo sapiens
ggctgagttctgcacccagtcaagctcaggaaggccaagaaaaggtacagaatttcagagtgggatatcagatctttagtgtgaagatacatctacatt

SEQ ID NO: 879103 - DNA, 98 bp, Homo sapiens
cccagcgggatgtgaaggactccgggtgaggccggccacgccccgcacggtgacttaagagattaaaattaatttggttgctgttggttctgaacaaa

SEQ ID NO: 879104 - DNA, 100 bp, Homo sapiens
acgggccttctggagatgcttccgtgtcaaacggctcagcaggcactggggctggctcgccatttttgcccacagttcggaagcatctccagaaggcccg

SEQ ID NO: 879105 - DNA, 99 bp, Homo sapiens
tgaagccactgattagcaatttaaagatcctctccaaggctcacctccacctccagtaaaagtttcttctgaacctcccacacaagccactccaaactc

SEQ ID NO: 879106 - DNA, 98 bp, Homo sapiens
aaaaagggaatttcaacgtggcccatgggctggcatggtcatattacatcggatatctgcggctgatcctgccagaccgaatccgggataccttgatc

SEQ ID NO: 879107 - DNA, 99 bp, Homo sapiens
gcatagtagagcctctcagcaaagaaggcagggcggttcagggcacactgcagatgaggtctggcaccctgagcagtccagcgaggacttggtcttagt

SEQ ID NO: 879108 - DNA, 98 bp, Homo sapiens
tgaaggaggctgcctggctgagctgatcggatcacctagagactggaaatgctttctgggtgtggaatccatagcatgttccctttacatttagctgc

SEQ ID NO: 879109 - DNA, 99 bp, Homo sapiens
gatcatctgcatagaggggaattggttgctgcaatacttcgtaaccggaaccataaatccatggctaaccttgacaaatacactgaaacattcaagatg

SEQ ID NO: 879110 - DNA, 99 bp, Homo sapiens
cgatttcgggaaatacttgatttagtatgtaaaagatgttttgctattcaggattatgaaactgctcaggaacacaatgaaaatgatcagcagattcga

SEQ ID NO: 879111 - DNA, 99 bp, Homo sapiens
cctttgcctatcactggacatcttggtgaagttatctcttggaaaacccacttatccaagcctcaggccacgccctaacaaggctgctggagctctggc

SEQ ID NO: 879112 - DNA, 98 bp, Homo sapiens
gacctttcagtcctatcggaaggatgatttcgttatgcttggatcctagcatgactatacattgtgacatggtcattacatatggattagaccaactg

SEQ ID NO: 879113 - DNA, 99 bp, Homo sapiens
ctcagattcactataccatgcagattgaaatggtgacgcagatgctgatgctgatgtagactctcttacagatagttgtggtgggaaggagactgaaaa

SEQ ID NO: 879114 - DNA, 98 bp, Homo sapiens
gagagccagagagatgtcggatttcgacagtaacccgtttgccgacccggatctcaacaatcccttcaaggtcgaatgagtgatttgagtgtaattgg

SEQ ID NO: 879115 - DNA, 99 bp, Homo sapiens
gacatccctgaatcttggtgtttggacataggagttttcggctttgtgagaaaccttaccatcaaacacgatggccagcaacgttaccaacaagacaga

SEQ ID NO: 879116 - DNA, 99 bp, Homo sapiens
tttcagtggtgaaatgcacttctatgagcttgtggaagacacaaaagatggcatctggctggttcaggtgggcagtgtcaaaccgggaaatgcttatag

SEQ ID NO: 879117 - DNA, 99 bp, Homo sapiens
tttcatctaacttgtcatgttccaacactacttagctttccaagagacattttaaatcctaaggatgtgatcacaactcgctttgagaattcctatcct

SEQ ID NO: 879118 - DNA, 98 bp, Homo sapiens
ctcaaccagatgaggaagtacaactttgagaccactctgcttcatttttgggagaaaacttctcacactatggcagccatccatgagagtttcaaagg

SEQ ID NO: 879119 - DNA, 99 bp, Homo sapiens
acagtgttctgctttcatggagttcacagaagagtcgaggagtgatgtaaattggagtcaaccaggtgaaaagaagttaactgggggatctaactggca

SEQ ID NO: 879120 - DNA, 99 bp, Homo sapiens
ctgcctcagcctcctgaggagctgggattacagagctaaatctgcttcgtaatgttgatgctaacaacactgagaatagcactactgtgaagaattcta

SEQ ID NO: 879121 - DNA, 106 bp, Homo sapiens
agaactggagaagttaaatcagtccacggatgatatcaacaaagtagccatcctcaagttcagtctcccgtctgttgatatcatccgtggactgatttaacttctc

SEQ ID NO: 879122 - DNA, 99 bp, Homo sapiens
gataacgggaggtgaatttccatgtcaacatagtcctggaccttaaaggctttgatccaggagagaaatactttcataacacatcatggggtgatgttt

SEQ ID NO: 879123 - DNA, 99 bp, Homo sapiens
tgccttcgcttcacggcgccgagccgcggtccgagttacaagatgttcacctaagattgagacctagtgactacatttcctacgggaacaaataaatgg

SEQ ID NO: 879124 - DNA, 99 bp, Homo sapiens
gggaagatagtcttcaggaaagacaccagttccacacaccagcccacagtccaggcccgctggagactatcagcatcctgtttccttggctccaccagc

SEQ ID NO: 879125 - DNA, 98 bp, Homo sapiens
tctttgttccaccagagtcattgcaggaagtggatgagttccacctcattttagagtatcaagcaggtggttagctcaaccaatggagagctgaatgt

SEQ ID NO: 879126 - DNA, 98 bp, Homo sapiens
tgaaaacaccgtggatactgcttccaagccaggacttcaggagcgtctccaaaagcatgattcagaatggacagtttagaagaacctcagaaaaaagt

SEQ ID NO: 879127 - DNA, 99 bp, Homo sapiens
ctcccgagtagctggtattacaggatttttgtccctgagtcatggaagacagaagagctgaaaagtcatgtgaacaagcatgtgaatcacttaagaggc

SEQ ID NO: 879128 - DNA, 99 bp, Homo sapiens
ctcccaagtagctgggattacagatggagttcgctcttgttgcccaggctggaatgcaatggcatgaccttggctcactgcaacctctgcctccccagt

SEQ ID NO: 879129 - DNA, 98 bp, Homo sapiens
ttgggaagtggttcctgaacctgttgccagatggtgcaatgttcaaagtactcaagatgaatttgagtgtggccagactccactgatgatagctgccg

SEQ ID NO: 879130 - DNA, 99 bp, Homo sapiens
tggaacccaagcagtggcgaagggaatcgcaaggctcttccctgaccattttctactgtccctgcgcgaggaagaaatgcagagtaacgtggaagtggt

SEQ ID NO: 879131 - DNA, 98 bp, Homo sapiens
gatcaccgacaagatcaccacggacgagatgatcaaacgcctgaagttcataattggacccttgaagacactcttcagtggttgatagagtttgttga

SEQ ID NO: 879132 - DNA, 99 bp, Homo sapiens
ccatggaggacgaagtggtccgctttgccaagaagatggacaagatggtgcagaagaagaacgcgacattgtatgcaaacctgttccattctttcttcg

SEQ ID NO: 879133 - DNA, 98 bp, Homo sapiens
ggccactgggctcccagcagcccaggttcagatgcagacagacatgctgaactatctggaagtccactgaaaagcaaaagcactaggaagcctttggc

SEQ ID NO: 879134 - DNA, 98 bp, Homo sapiens
tccggaggtttgcaggggtgcagtgtgtctggtcttatgagagatgctgcctatggaagttgcaatttctacattacacttcttgactgttttcatgc

SEQ ID NO: 879135 - DNA, 99 bp, Homo sapiens
ttctggctctgaaggcgaacgcttcgctggccatttaggagctctgctcaaagccagacggaaattagaaatatcttctggaaagctggccagatttgc

SEQ ID NO: 879136 - DNA, 99 bp, Homo sapiens
ctgctttccaatgttacctcctgtcatcatggactggaatgcagctttgaagtttactacaccaactgcagttgaagccaatctgagaagatacacagg

SEQ ID NO: 879137 - DNA, 98 bp, Homo sapiens
aaggacagcttttttcctgcaagctgttccatttcctccaagtcaccggcttacagcaaaagaagtgtttgataatgatggaaaacctcgtgtggata

SEQ ID NO: 879138 - DNA, 99 bp, Homo sapiens
cccaggtattcgaaggtgttccagtcgatcacatcaatcaccgggcacaccactgccgactcctcttcatggatcctgtaatcccagctactccggagg

SEQ ID NO: 879139 - DNA, 98 bp, Homo sapiens
agaaagtggttgcgtttcatgagtcgggccacgccttggtgggctggatgctggagcacacggaggccgtgatgaagctactgtgaggatggcttcat

SEQ ID NO: 879140 - DNA, 99 bp, Homo sapiens
tcgaatgtgtacataactcccgcaggatctcagggcctgccgccccattatgatgatgtcgagatcctgtttgaccaaactcagagatcaattaaggca

SEQ ID NO: 879141 - DNA, 98 bp, Homo sapiens
gtgagaaaacggctgcatattggtgtcaaagtgtcactgaactaaaggctgactttccagacaacgtacatcgagaagtctgcagaggagctggacga

SEQ ID NO: 879142 - DNA, 99 bp, Homo sapiens
gcctcccaagtagctgggactgcaggtttgtctacagattttgagcgttcgaagttgacccctgactaagtatactttgctgctccctcagcctttgaa

SEQ ID NO: 879143 - DNA, 99 bp, Homo sapiens
aaaaagtaaaacttgctgctgatgaagatgatgacgatgatgatgaagaggatgatgatgaagaaatgcagtaatagtggccttgtcttcaaaatcatg

SEQ ID NO: 879144 - DNA, 99 bp, Homo sapiens
ttctttcatggcaaccagatttttggaaacttcttctgtagcctggttcatttattctgccaaatgtatgcctggtattgtgttttttggtcttgaaac

SEQ ID NO: 879145 - DNA, 99 bp, Homo sapiens
acgaaagcctttctctttcaaggtacagtctgaaaatacagcctgttgagaaaatgcatctagctgtagttgcctgtggtgaaagactggaagaaacta

SEQ ID NO: 879146 - DNA, 99 bp, Homo sapiens
ggagatccaatgagaaaacctggacagaacttcatgtgtctgtggcagtcttgtaaaaagaaaatgtttataggaggccttagctgggacactacaaag

SEQ ID NO: 879147 - DNA, 99 bp, Homo sapiens
gtacctcattgctctttggcgactcttattggatgtacagttacccagcacgtgtacctcctcctcctcctattgctcgggctgtagtgccctcgaaac

SEQ ID NO: 879148 - DNA, 98 bp, Homo sapiens
gtgcatggcgaagtccccggagaactctaccctggaggagattctggggcagtatcaacggagtctccgggcactgaagataaaataccctcatcaac

SEQ ID NO: 879149 - DNA, 99 bp, Homo sapiens
gttaggaactgggtccccaaagtcttggaacagcgacgacaaggcttggaaacatacttacagcttaatgatgctgaaaataagtataagattttggaa

SEQ ID NO: 879150 - DNA, 99 bp, Homo sapiens
attgaggctttacagctgcatgagaaccgtcaaattggccagtcggctttgaacatcatcgagaagcactttggtgagtgttatgtgccaagaaccttg

SEQ ID NO: 879151 - DNA, 99 bp, Homo sapiens
gtttcagttcgccgatgggaaacccggagaccaaatccttgagtgtgaacatggctacgcctcttcattcccgtccatgccgagcccccgactgcagca

SEQ ID NO: 879152 - DNA, 99 bp, Homo sapiens
ggagttggggaagctctttcacttcggaggattgctcaacaaccatgctgggcatctggaccctcctacctctggactctgacaccaccataccaatgg

SEQ ID NO: 879153 - DNA, 99 bp, Homo sapiens
cccagtcacagcgcctttggcattggcaacaatcttaagcactcttcctgaaaggccaacaatctcaccatcctttggctctacttctgtagcagtatt

SEQ ID NO: 879154 - DNA, 99 bp, Homo sapiens
tctcttaccttgtgtttgatgaagcagatcgaatgtttgacatgggatttgggaagaaggagaaagggccaacccctgaagaagcaatacagaaactga

SEQ ID NO: 879155 - DNA, 99 bp, Homo sapiens
gatcagtccaagttgacggacaggaggcgaaatgtgcaaatgtttatgggattatcgagattgcagcctgtcactccacacacacgtctgcggccaaga

SEQ ID NO: 879156 - DNA, 98 bp, Homo sapiens
gaggttgtgtgtgggttagacttgtgcaaccagggcaactctggccctgaagaggaaagtgaggatgactctcatctcgaaggcagggatcctgatat

SEQ ID NO: 879157 - DNA, 98 bp, Homo sapiens
gcaccgcagtgcttaatgctgtcttaactagtgtaggaaaacggctcaacccaccgctgccgaaatgaagtataagagatgtggtactggatcttcct

SEQ ID NO: 879158 - DNA, 101 bp, Homo sapiens
ttgaattcgactagaggggatgcagatatgtatgatcttcccaagaaagaggacgctttactctaccagagcaagggtgggcccatctggggcagggaaga

SEQ ID NO: 879159 - DNA, 99 bp, Homo sapiens
tcgatatcacagccaccaaccacactaacgagattcaagattatttgcaacagctcacgggagcaagaacgaccaaactagagtcagaacgaatactag

SEQ ID NO: 879160 - DNA, 99 bp, Homo sapiens
acagatccgacatcgacgcagtctacgcgaccatggccttgctgggtaagcgctgtgacgtccccaccaacggctgcggacccgaccgctggaactccg

SEQ ID NO: 879161 - DNA, 98 bp, Homo sapiens
tacaaccttcgatctcctgacgaattagtgatgatgaaccaggttatgaccttgatttattttgcatacctaatcattatgctgaggatttggaaagg

SEQ ID NO: 879162 - DNA, 99 bp, Homo sapiens
aattaaagtggaagtagaggtggaggtgaaagaagaggagaatgaaattagagaggatgaggaacctccaaggaagtccgtaaaattattagagtttgc

SEQ ID NO: 879163 - DNA, 98 bp, Homo sapiens
tgcgggtattggatgattcgtagctaagacttcgcgacacccttgaagctgagaaatgcctagaacattccatattctgcttcacacacggtgactca

SEQ ID NO: 879164 - DNA, 99 bp, Homo sapiens
cttctgtcgattgagtatcttcacagctactttatgcccagtcaattcatgtttgccaacttggatagattccttcccagcactgtgagcgtcaccaag

SEQ ID NO: 879165 - DNA, 98 bp, Homo sapiens
ctaactttgcacatttcaacagtcatgcaggttggtcaaagaaaaagtgatgtatgaaaaagaggcaaaacaacaagaagaaaagattgaaaaaatga

SEQ ID NO: 879166 - DNA, 99 bp, Homo sapiens
gccaacccggactggatcaacaccggggagtctgcggcgcaaatctgtccaaggctgcctggggagcattggagaagaatggcacccagctgatgatcc

SEQ ID NO: 879167 - DNA, 98 bp, Homo sapiens
gtacgccctcatggggaaaatctccccggtgactttcagtttcaggaaaatgccagtgaagggaaggcccctgcagaagacgtctttaagaagcccct

SEQ ID NO: 879168 - DNA, 99 bp, Homo sapiens
gtttgtagctcgtgtgttgtaaccactctcccatttggccaaacacatcccaagtggcagagctcgggtcaggttagtggctggaggatctgtttctgg

SEQ ID NO: 879169 - DNA, 110 bp, Homo sapiens
ctcttctgttgaattgactagaagaggtgattcttcaggaaaatgtctaatcaacaggagaagtatgaagctcagaatatagtcaattcaacagaagagagtgatgatgc

SEQ ID NO: 879170 - DNA, 99 bp, Homo sapiens
gaacaccgcgccttcggaagcccgttcggcctggaggagccgcagtgggtcccggacaaggagaaatgcgtgtactgccggaagcggatgaagaaggtg

SEQ ID NO: 879171 - DNA, 99 bp, Homo sapiens
ccaaggtttgggacgatcaggctgtatggaatgtggactactgccagatcctcaaggacattacagttgaggacatccggatcgagctgggagatgtga

SEQ ID NO: 879172 - DNA, 98 bp, Homo sapiens
tctatcatagctgtgatagctttgcttgctgtggggttgacccagaacaaagcattgccagaaaacgttaagattgcagtgagtgccagcaccatccc

SEQ ID NO: 879173 - DNA, 98 bp, Homo sapiens
caacaagaagtggattacgagggcagttcagaatttaggccacccgtattggcttaccttggctccaatgtatatttggtttataattttcttcatcc

SEQ ID NO: 879174 - DNA, 99 bp, Homo sapiens
gcttctagagaattaccttatcagtgcaggagaggattgtgtctgcttggtgtggagccatgaagacagaatgttgctgcgggatgtaaaagctcttac

SEQ ID NO: 879175 - DNA, 99 bp, Homo sapiens
aggagcacgtcaagacggccctggagaaccagaagaaggcgaggaagaaacaagggcagctgcgttccctgcacctgacatgtgacagcgccccagttg

SEQ ID NO: 879176 - DNA, 98 bp, Homo sapiens
gctgcccagcgagatcctcggggccccagaggccgcggacaccgacctggaggtgccatgcctctgcaactcctcctgttgctgatcctactgggccc

SEQ ID NO: 879177 - DNA, 99 bp, Homo sapiens
gccacactttcaaacacctgatagacttcaatctgacctgcttgagtctgagctcctgtatatggtggctgctgtggctgaacgcctggtgggtgagct

SEQ ID NO: 879178 - DNA, 98 bp, Homo sapiens
aatggaccaacttctttggcaagtggacattttactggctcaaaagattctagtgttccagaaactccagataatgaaagaaaagcaagtatatcata

SEQ ID NO: 879179 - DNA, 99 bp, Homo sapiens
tagttcggggttgtttttttatagctttctcctcacagctgtttctttgagcaaaatgaactgctttctccaggggttaaaaataagaattttaaatgc

SEQ ID NO: 879180 - DNA, 99 bp, Homo sapiens
agcctcctgagtagctgggactacagtctcaaaccatgaattatgtgggacagctggctgggcaggtgattgtcactgtgaaggaactctacaagggca

SEQ ID NO: 879181 - DNA, 98 bp, Homo sapiens
acggacggcagcggccaagcaagaagaaagacgtggcagcaagcgggagtcggggatagtgtcatcggttcggtgctggagaatctggtaaaagcacc

SEQ ID NO: 879182 - DNA, 99 bp, Homo sapiens
gctggagcaaggcgacgaaccttggagagaggagaacgaacatcttctggacctttgtccaggacagagcgggatgccaccagcttgtccaaagggaag

SEQ ID NO: 879183 - DNA, 98 bp, Homo sapiens
ctccctgcaggtggtgcagaggctgcagggggagggggccgaggttcagctgactggaaagctgaacatactgacttgtggagtcattggctcctatt

SEQ ID NO: 879184 - DNA, 99 bp, Homo sapiens
cttggactggaaaactcacacccggtctggacacagaaagagaaatacaaactggactctcaggacaaaacgacaccagccaaaccagcagcccctcag

SEQ ID NO: 879185 - DNA, 99 bp, Homo sapiens
cactagcagccagttccggcccgaggacaccgactaccagcagggctgaagaagatgcagagcagcctgaagctggtggactgtatcatcgaggtccac

SEQ ID NO: 879186 - DNA, 99 bp, Homo sapiens
ggaagatgtcgccaaaggccaagtcgccaaaggtctccaactttccagagccttccacagcccaaggtgccagagttcccagggcaagcagcaccagga

SEQ ID NO: 879187 - DNA, 103 bp, Homo sapiens
ctgccagaagcgttttgatgagtccatgcaggtctttgctaaacttggcacaggcaagaaaactgatcagtgattttgccattatcttgtccattctcatctt

SEQ ID NO: 879188 - DNA, 99 bp, Homo sapiens
ttatgaacgccttgttgcccagttccccagttctggcagattctggaaactgtacattgaagcagagatgagcgtgaagccgtgcagaagaagaccttc

SEQ ID NO: 879189 - DNA, 99 bp, Homo sapiens
tcatgacaagctggtgttgaagggtgattttgatgcttgcgaagagttgattgaaaaggctgtaaatgatcttaccaatatatttgagtccttcctgcc

SEQ ID NO: 879190 - DNA, 98 bp, Homo sapiens
aattggaagctaaagctaccaaagacgtagaaagaaatcttagcaggtcacaaggcacttaaagcattgttgaggtcattggtaggtcttcaggaaga

SEQ ID NO: 879191 - DNA, 98 bp, Homo sapiens
tggcagtgccatagctcctttgggagatctggaccaggatggtttcaatgatttcctttcctggatgaaaatgttgtctcctttctaaattctctgcc

SEQ ID NO: 879192 - DNA, 99 bp, Homo sapiens
tcagaagaaggacttcggaatgcactacaacaggaaaatcatattatagatggagtaaagtgagttattctccccacctcagaagtaccagcttttggt

SEQ ID NO: 879193 - DNA, 99 bp, Homo sapiens
gggatgattacagttcttcctaaaaaagggtccaagacgcggaagatcccataccccaccaagaaccccttcacgtggctcttcctgctggtgtcctgc

SEQ ID NO: 879194 - DNA, 98 bp, Homo sapiens
tgtgtccaagctgctcggcttggagcaatgacgtccatggtgtgtaagtgaaacaaagagtcctcttcgtggaaaagaaaaaaatacgctccctttaa

SEQ ID NO: 879195 - DNA, 99 bp, Homo sapiens
cccggcggcagcacgaaagtaccatgggttccaatttcatctgctgttgcaggcgtagcaataggattggtcaccaaaaccgatcctgagaagggtgaa

SEQ ID NO: 879196 - DNA, 98 bp, Homo sapiens
taaaggaaaggaagaaatgcaatttgctgttggctggagtggttccttaaatgtcgaagaaggtgagggccccaaggctgttgcagctcctcgacctg

SEQ ID NO: 879197 - DNA, 99 bp, Homo sapiens
ctacactgagcagtaacagcaaaaccttgctcagaatacggatgaggtcaccccgttggaaggacagttcatctggctggtcaccatggcaatcccata

SEQ ID NO: 879198 - DNA, 99 bp, Homo sapiens
gagcagttccgcacgaccatccattgcagatgcgcagacatggcggcgggtataagtttagggatggaaccatatttgggatgacttgaaagtattcct

SEQ ID NO: 879199 - DNA, 99 bp, Homo sapiens
agatcagcgtgaaggagttgcggacaatcctcaataggatcatcagcaaacgccatgtcatggtaaacggtccaaccaccccgattcccgtcaaggcca

SEQ ID NO: 879200 - DNA, 98 bp, Homo sapiens
gggctcggcggcggcggccaggtccctgctgaatcacacgccgccatccgggaggcccagggaaggtctgccatcatggatgttctcgcagaagcaaa

SEQ ID NO: 879201 - DNA, 98 bp, Homo sapiens
aaagtccagctaaagcggcctaaggatgccaaccggccctactgagggcccccaggtgaccaagaatatggcccaggtgaccaaagccctggacaagg

SEQ ID NO: 879202 - DNA, 99 bp, Homo sapiens
tgggtgccgtggcatgtcgatttgtccttcactacagaggtgctgatactcaaagaaggtttaagttgtctgatctctctataaattccactgaatgtc

SEQ ID NO: 879203 - DNA, 99 bp, Homo sapiens
tggttctttaaaactcctttgccaacaatcattggctctcctactaagcctgggttactaggtgtctttcagaagctgattgcatccaaagcaaatgac

SEQ ID NO: 879204 - DNA, 99 bp, Homo sapiens
tcatggtaaaaagcagtgggatttggatgtgggatccggttccttggtgtcatccagccttagcaaaccagaggaatgtatcctgtcaggtataatgtc

SEQ ID NO: 879205 - DNA, 98 bp, Homo sapiens
ctacagagcacccgaggtcatccttggcatgggctacaaggaaaacggtcctcagtttgcagaagacccctcccagttgccttcaactcagttacctt

SEQ ID NO: 879206 - DNA, 99 bp, Homo sapiens
ccttcaagcagggcatggagtattaccgtgccctcaagacccggaatgtgcctgttcggagtctcaggagcaggggctgcggcagaggctgctggacga

SEQ ID NO: 879207 - DNA, 98 bp, Homo sapiens
ccgtttctacactgtcaccgagccccagcgacacccgaggggctacacagtatataaggtcaccgcccgggttgcccctctacctggcctccctcttc

SEQ ID NO: 879208 - DNA, 99 bp, Homo sapiens
tttcaagaaaccaaaagttgttacaggctggagaggaaaaccagggtcctgtattaataggaagttcacatggtggtgtcaacattgaagatgttgctg

SEQ ID NO: 879209 - DNA, 99 bp, Homo sapiens
gggcgggcggcatcggctgcgagctcctcaagaatctcgtgctcaccggtttctcccacatcgacctgccttcctaatgatggtgatgaaaaatatgag

SEQ ID NO: 879210 - DNA, 99 bp, Homo sapiens
tccttttgtgcgagcgccggcggctcggcttctcgaaggtactccaaagattcaggtttactcacgtcatccagcagagaatggaaagtcaaatttcct

SEQ ID NO: 879211 - DNA, 99 bp, Homo sapiens
ggtaagtcaaggcgattaaagctggggggctgagaagctgaagaacttcagtgtgttccatagcctgcaggaaatcactcaattctgtgactgtgcaac

SEQ ID NO: 879212 - DNA, 99 bp, Homo sapiens
cagtggtatgactttcttcaaaatagcagccaccttaaagctgcactgggtgttcaacagccatcactccttggagcatctcctaccatttatacacag

SEQ ID NO: 879213 - DNA, 98 bp, Homo sapiens
ttgctctgaaatagcatctctgtttttgaatgataaagagccaacaccactatctgagcaaaagcagacatgtgtcaatttaaattctacatctatgt

SEQ ID NO: 879214 - DNA, 99 bp, Homo sapiens
tatccactgtctcctttgagtgactttgccacacaggactcctttgatgatgatgaactggatgcagctgtagcaggaacagggtctgttccacaaaaa

SEQ ID NO: 879215 - DNA, 100 bp, Homo sapiens
catggctcatattctacttcattcagaagatcaggtacacaagttcctgtcgcgtgcatttgtgtacctgatcttctgaatgaagtagaatatgagccat

SEQ ID NO: 879216 - DNA, 99 bp, Homo sapiens
gagaagcggcagaaggagctctggaatctcctgaagattgcttgtagcccaatgacgaaagtggagctaacgtggatgcgtccaaaatgtggcgcgatg

SEQ ID NO: 879217 - DNA, 99 bp, Homo sapiens
agtcaccggatgatggagaggtcaatgagctgagatctgtatctgtggacctgaatgttgatccctcgcttcagattgacatacctgatgcgctcagtg

SEQ ID NO: 879218 - DNA, 99 bp, Homo sapiens
ctggcttataatctttgagcagctctgctgacttccagacttcctctggatcaggtatccaaaccctggcaaactgtagtcccagctactctggaggct

SEQ ID NO: 879219 - DNA, 99 bp, Homo sapiens
ctaaagaggcaccattcgtacccgttgacagagtctagctctttcacccaggctggagtgaagtggtgcaatctcagctcagtgcaacctccgccccct

SEQ ID NO: 879220 - DNA, 99 bp, Homo sapiens
tcaagaagcattatggctattccctatattcagcaattaaaatatttcagcagttgaatcagttgaattcacttcatcaagaaactatcatgaaatgcg

SEQ ID NO: 879221 - DNA, 99 bp, Homo sapiens
agatctgatcacctgtctggagcaaggaaaagatccctggaatatgaagagacacagtatggtagccacacccccaggacacagcattgttggttttgc

SEQ ID NO: 879222 - DNA, 99 bp, Homo sapiens
ggagggattctggcatcagggaggctttcagccggagaagcgagtttcagctgtgctcaagtaaagctctttgtgacagggcttttcagcttaaatcaa

SEQ ID NO: 879223 - DNA, 99 bp, Homo sapiens
gcgccaccccgaagagagagaaatcccaatggatcccgaagcagattctctttgtggccagatgggtttgtatggacaggcttgtccatctgtaacttc

SEQ ID NO: 879224 - DNA, 99 bp, Homo sapiens
ggacatgttgaaaattaggtctgaattcaagagaaagtacggcaagtccctgtactattatatccagattggtggaacgagaatgcctacacgcagcca

SEQ ID NO: 879225 - DNA, 98 bp, Homo sapiens
gatcctgagtacaacacggtggcaagcaagtttaatcagacctgctcacacttcagaatagagaagcatgattttgaagtcagaggagatgtggtcaa

SEQ ID NO: 879226 - DNA, 99 bp, Homo sapiens
gctttttaaaggactgctgcctctatttcctgctgtctgtggtgcctgctgccttatataccagggcatcctaacagctgccactgcagagccccgcca

SEQ ID NO: 879227 - DNA, 132 bp, Homo sapiens
ttcacggtgaccttcgcttggtgtcctcctggcctcagcaacctgacaattctgtcgtgtcccggtcaaaatgcagatcttcgtgaaaacccttaccggcaagaccatcacccttgaggtggagcccagtga

SEQ ID NO: 879228 - DNA, 99 bp, Homo sapiens
ctcttcctcagacaaccagggtccatcagtagagggaaccgacttggaatttgaggactttgatgtgcaaagatccaccttacaaagtagaagaatctg

SEQ ID NO: 879229 - DNA, 99 bp, Homo sapiens
caaggaaacaaatcaactaaaaacaaaattgccagaaaatctttcctctaaagtcaaactggtttacaaagcaacaggtgaagatttccttaaaattgc

SEQ ID NO: 879230 - DNA, 98 bp, Homo sapiens
cctattcaagttcatgtcacgctgggtaatgaggatttgactgtgaagggttgtggagttgctcagtgcttgaagattgtctgccaagttgggagatt

SEQ ID NO: 879231 - DNA, 99 bp, Homo sapiens
cttatatgtgatgccattccagcactggactcatggaggctgagcatttattcaggaaattcagttcatgaagataagaagtttcttgacaaatacatg

SEQ ID NO: 879232 - DNA, 98 bp, Homo sapiens
gatgggacgctgcaggccctggaattaagtagactggctggacagattcgaaggttgtatggttcaaacaaaaaagctgacaggccattttggatctg

SEQ ID NO: 879233 - DNA, 99 bp, Homo sapiens
tgcgccgagctgcacgtcctcgaacgcgaggccaacagccccgctatgaaacccacgtagtcgaacaccgtgatgcttctcctgcagggcgtgtgatga

SEQ ID NO: 879234 - DNA, 99 bp, Homo sapiens
accacttgatatcagtcactccagacagcatcagggatgggaaagtgtacattcaccatatgtcacccactggaggaagagagagaaaatccttcaaaa

SEQ ID NO: 879235 - DNA, 99 bp, Homo sapiens
catggtgctggagtgggaccacattgaaatgaatttccggagctatgacaacattacagatattgatgatgttaagaagttcaaaccgggttacctgga

SEQ ID NO: 879236 - DNA, 99 bp, Homo sapiens
tatttatgtcatcaagaagaatgacgatgctgcgttcctttgcctgcaacaggggtcaagatgagttttgcctgacttctttgatgtcctgaactttcc

SEQ ID NO: 879237 - DNA, 99 bp, Homo sapiens
aaacaattcacatttatgacatgaaaaagaagattgagcatggggctctagtgcatcacagtgagatgctgcccccacccccttaggcccgagggatca

SEQ ID NO: 879238 - DNA, 99 bp, Homo sapiens
ggcctcttcagcactcacagcatcaggatcagagggagcatttcccacagctccaagtgaaaccaggatattctcccgggggctaatgttcttgtcata

SEQ ID NO: 879239 - DNA, 99 bp, Homo sapiens
tgatctatctgtggaacaacccgtgcagttcagatcttttgacagatgtgttcagagcaacattgttttgttgacacaagcatttagaagaaagtttgt

SEQ ID NO: 879240 - DNA, 99 bp, Homo sapiens
gggctagaagcactgctgattgctttctctactagtaactccatagccttcagagaatcaactaaatcatcaactaagaagaggcgcctgagttccttt

SEQ ID NO: 879241 - DNA, 99 bp, Homo sapiens
tgaagagaacagagctgttattgagaaaatgttgttggaagaagacattgtttgtgctccccaaacctaaagtgatctcctgtctagagcaaggggaag

SEQ ID NO: 879242 - DNA, 98 bp, Homo sapiens
actggagaggatggctactatttcaccaatctgaacgtcgaaatgctgagcagcatggattctgcatcggttcgcattatcaaaccctttcctgcgcc

SEQ ID NO: 879243 - DNA, 99 bp, Homo sapiens
aggatgttcagctcacagagatcaaaccacttctaaatgataaggtgcagcggaactgctgcctgacgctctgcaacttcagcatccccgaggagctgg

SEQ ID NO: 879244 - DNA, 99 bp, Homo sapiens
ggcaagatgtccagtaatgtcccggcggatatggaggtagatgacttctttgagcaagagaagaacttccttattaactattacaataggatcaaagat

SEQ ID NO: 879245 - DNA, 98 bp, Homo sapiens
agctaacaatgtaatcatggtttctgctattggcaatgacggacctctttatggattggccttaagagaaggacggagccacatactgctgacggccc

SEQ ID NO: 879246 - DNA, 99 bp, Homo sapiens
tggcccccctggaattacgggattcccaggattcataggaagccggaagtggtccaaaggcaaagttcgggacaagctcaataacttagtcttgtttga

SEQ ID NO: 879247 - DNA, 99 bp, Homo sapiens
ctgggtgacagagcgagactccatcttgaattctgataaccattcttccacaacacaacggtcagttcccagcattttcttttaccttctactcctctt

SEQ ID NO: 879248 - DNA, 99 bp, Homo sapiens
gcgggactccaaatgggtcgcagtcgcagccgctctccacggaggggatctgaagaagatgatgaagttgtggcaatgattaaggaattgttagatact

SEQ ID NO: 879249 - DNA, 99 bp, Homo sapiens
gtaactgacaaggaggccaggaagaaggttctcaaacaagggaagacaaaggcgctttggctaagctggtggaagctatcaggaccaattacaatgaca

SEQ ID NO: 879250 - DNA, 99 bp, Homo sapiens
tctaatcaacagagttacatagctgctatcagtgcccgctttgttcagctgcagcatggagagatagataaacgggtgtatctgtccctgcttcggatg

SEQ ID NO: 879251 - DNA, 99 bp, Homo sapiens
aggaggtgctcaaaacgcccgtgcggaccacggcctgtcagcacgtgattctgatcttcgaagtgcacttcttttggaacaggcagcacattgctttat

SEQ ID NO: 879252 - DNA, 99 bp, Homo sapiens
gtacttgtacctgtctggattattcattattacatgaagtatcatgtttctgcatacccagatggaagtagcaaagaaaagagaagagcagcaattgcc

SEQ ID NO: 879253 - DNA, 99 bp, Homo sapiens
gggcctctgagatatgccgtttacggggctgggaagaggctaggcgacgtggtttcagatacgaaaaggactattgctgggaatattttctgtcttcaa

SEQ ID NO: 879254 - DNA, 99 bp, Homo sapiens
ggagatggcaaagacatcttctggtcagagatacttcttaaagaggcgattatgcagccccttgatcataagaatctggatatggatgtgccatacttt

SEQ ID NO: 879255 - DNA, 99 bp, Homo sapiens
agctggccagcgagagccagggctccaaagaactcggaaaagaattccatggcaacatcattaaagtgtcctttgccactagaagacctgaattcatga

SEQ ID NO: 879256 - DNA, 99 bp, Homo sapiens
gcagagagagacacactgagagggagatgattattagttgcgttgagtcatcaggcaaaatttggtgcttccagatgtgagttatcaggtggaatccag

SEQ ID NO: 879257 - DNA, 99 bp, Homo sapiens
aagaggaacatgaagatgaaagccgtgctggctcagagaaggtcttggcatggtcacacctatcaatgaccttcctggtgcagatacatcctcatatgt

SEQ ID NO: 879258 - DNA, 99 bp, Homo sapiens
gttgactttacaagaatatgaattcgaaaagcagttcaacgagaatgaagccatccaatggatgcaggaaaactgatatttcacattttcaggaacaaa

SEQ ID NO: 879259 - DNA, 99 bp, Homo sapiens
atggtttccagcttcatccatgtccattctggaaatcattaactgcaattgcttcttcagctccacttcccattttaaaggtctccaagttgttcccag

SEQ ID NO: 879260 - DNA, 98 bp, Homo sapiens
taaaacggaaaggttcggaatttgcctctgcgccgtctttttttgcctgttacctgtgacgtccttggaatatgacagaactgatggtttttcacaca

SEQ ID NO: 879261 - DNA, 99 bp, Homo sapiens
aaggtgtattcagagattttttagtctaaatgatgggcagtcatggtcccagaaacgtcactatcaagaagttccagtctcatcagattttccatgtcc

SEQ ID NO: 879262 - DNA, 98 bp, Homo sapiens
cgactcctgaagacacacctgcccctggctctgctcccccagactctgttggatcagaaggtcaagactgctttgccagcaacatgctcaattcccga

SEQ ID NO: 879263 - DNA, 99 bp, Homo sapiens
ggagagggaacatgctgagaaactgatgaagctgcagaaccaacgaggtggccgaatcttccttcaggatatcaagatgatgattattccccaccttct

SEQ ID NO: 879264 - DNA, 99 bp, Homo sapiens
aaacagcaagaactgcttcggcagggtatgcagaagttggctagtcaatacctgaagagagattggcctggagtaaaagctgatgatcggaatgattac

SEQ ID NO: 879265 - DNA, 99 bp, Homo sapiens
gttggaccttccggagcttctcagaagacagagggttttcttttgaggaggtgattacagtgcgtgttcaggacccccgagtgcagaatgagggctcct

SEQ ID NO: 879266 - DNA, 99 bp, Homo sapiens
gaagttcaggaaacatccaagaaaaatgtccttaaagcaattgagcaggctgatctactgcaggagggaaaaagaaatagtggtttcagacagtgcttc

SEQ ID NO: 879267 - DNA, 98 bp, Homo sapiens
agaaactgttggagtttatatacacaggaactttaaatcttgacagtagcacgatacaaccgcaccagctacttctaccccacattctcagagagctc

SEQ ID NO: 879268 - DNA, 98 bp, Homo sapiens
tggattgtagctgcatatgcccattttgctgtgtgttacagtggaaattgatgacttgaaaaaaattaccaattcactgactgtgctttgcagtgaaa

SEQ ID NO: 879269 - DNA, 98 bp, Homo sapiens
gtgactcaaactgtgagaacttcagggcaagtgtccagagaatggctgggatgaaagtacacttgaactctttttacatgaacttgcaatcatggaca

SEQ ID NO: 879270 - DNA, 99 bp, Homo sapiens
ctgggcgacagagcgagacccttttgatggtgggaacttccatacaatcagcttctgccactcttctccaaggtgataaagtatgttctgtttctgtat

SEQ ID NO: 879271 - DNA, 98 bp, Homo sapiens
gcctctcaagtacctggaattacagattctgatgctcacagtaccacctcaagtgcctccccagctcaatctccttgttacagtaaccagtcagatga

SEQ ID NO: 879272 - DNA, 99 bp, Homo sapiens
cggcctgcgctcccatccacacgctcgggtctcccttgatctgagaatggctacctctcgatatgagccagtggctgaaattggtgtcggtgcctatgg

SEQ ID NO: 879273 - DNA, 98 bp, Homo sapiens
ttgtgcgttgcggccagtcgccactgctggagagtcccgtattctcagagtaaaagttgtttctggaattgatctcgccaaaaaggacatctttggag

SEQ ID NO: 879274 - DNA, 99 bp, Homo sapiens
tcattctcttcactcgagagatgaggacactgaaattcagagaggggaagtgatttgcctcagcttgtactgtccaatgatgcatcagcagcctccttc

SEQ ID NO: 879275 - DNA, 99 bp, Homo sapiens
ctatgctcacgagccagtacgtacgtctgacccctgacgagcgcagcaaagagggctctatctggaaccaccagagatggagtcttgctgtgttgccca

SEQ ID NO: 879276 - DNA, 99 bp, Homo sapiens
aattcttcagattggaaaataccacaggatggagactacgagttttacacattttggaactttatacccaagaatttatttgaacaattcagaagagta

SEQ ID NO: 879277 - DNA, 98 bp, Homo sapiens
ttggaggaggtggccccagtgctgcagcagacattacttcaggacaacctcttgggcagggtaggtagccatccaagcttcctgaaggaggttcgaga

SEQ ID NO: 879278 - DNA, 99 bp, Homo sapiens
gctggaatttggtggggcttccggcccctttcttcagtagctactctgtgggctcttgtctccagctcctcatctgcagggaagtgctgttctcagaga

SEQ ID NO: 879279 - DNA, 99 bp, Homo sapiens
cctgctgaagtcctagaaatgcaggaagactgtccagaagcacaaatagggcaccattcccaaactcacagctaaatccaactgccgctatgaaattga

SEQ ID NO: 879280 - DNA, 99 bp, Homo sapiens
caaattttcaaactcaggcaagtttagaaatgtcttcatattgaattccttcaactctgcgtccttttaaagggccctgtaatcccagctacttgggag

SEQ ID NO: 879281 - DNA, 99 bp, Homo sapiens; identical to SEQ ID NO: 828188

SEQ ID NO: 879282 - DNA, 98 bp, Homo sapiens
aaaagggcccccactgtgggaggaagatcctggagccaaagatgttgtccaccttgacagtgaaaagattgtttcccagagaaagctgtccaaatcct

SEQ ID NO: 879283 - DNA, 98 bp, Homo sapiens
gcagaatttttgactggagactatagtagatctgaactcagaagtcaccttcccggccttctctgagaatctgatttgatatgtggtccttcccttct

SEQ ID NO: 879284 - DNA, 99 bp, Homo sapiens
cgcgacgcgcccggcccggagcccccagcgcagcggccgcgaatcttgtggaagaagaatgaagttgctgattatgaagctacaacattttccatcttc

SEQ ID NO: 879285 - DNA, 99 bp, Homo sapiens
cagcctcccctgctgaatctgagccacagtgtgatcccagctttaaaggagatgcaggagaaaatacggcattgctaggccacttggatgttgtagcat

SEQ ID NO: 879286 - DNA, 99 bp, Homo sapiens
gggagacccggctgggaagtgcaggcaaagccggctgttaccctgcacagccgtcaccctcaactttcccttcaggcaagctgtatgggagaggttcga

SEQ ID NO: 879287 - DNA, 99 bp, Homo sapiens
gtggtttccatgcagcgatggctctcaattccatagaatgtgtgtttgtaacaacctcctctccctcggagcatggactgtaatcccagctactcagga

SEQ ID NO: 879288 - DNA, 99 bp, Homo sapiens
atcacttcagcagggttttttgaagaatcaaatattcagtgggatacaaatgatgactgtccaagtgcctccaaagtgtacaaagcatcagattcagca

SEQ ID NO: 879289 - DNA, 98 bp, Homo sapiens
ggaccgcgaggttttgttcctgggttgtttttcaccattcagaacattgcctgaagcaggtccaccatgccgttagtaacgaggaacatcgagccaag

SEQ ID NO: 879290 - DNA, 98 bp, Homo sapiens
cagacgcaggactacgagtgcaggagccataatgtcgacctgccggagtcgaggattccagggtcgaacactcgttgcttctgcaggaagcctttttg

SEQ ID NO: 879291 - DNA, 99 bp, Homo sapiens
ctcctgtgaaactccagaagcagaaagtacagtctatgaatgagatagtccagagcaacctctttaaaaagcaagccctcaaggacgttttgttctgaa

SEQ ID NO: 879292 - DNA, 99 bp, Homo sapiens
acgggttcgcacacccattcaagcggcaggacgcacttgtcttagcagttctcgctgaccgcgctagctgggtatgagtattatagaacaattagaccc

SEQ ID NO: 879293 - DNA, 99 bp, Homo sapiens
atccggattaccctcttcctcctgcagtgacaccattctggagggagccctcgtagaagatgttggatgggaaggcgctgagtgcagggtgcatccggt

SEQ ID NO: 879294 - DNA, 99 bp, Homo sapiens
aatttccagatgccttgttcaacagcggacaaacataaattgcagagattcctgactgctgacatggccctggtggcgacagtctatgcgccaatcact

SEQ ID NO: 879295 - DNA, 99 bp, Homo sapiens
tgattgatacacctaccagtccagttaccagtggacttccattattctttgtgataacagtaactgccataaagcaggatgcagaaaatgcgattgtgc

SEQ ID NO: 879296 - DNA, 99 bp, Homo sapiens
cccttcgtgtgcgcttgggcgaggccgggcggcgcttctgtcctcctactcggacccgcagaatatcctccgaatcctaaatctagagctccaaggatg

SEQ ID NO: 879297 - DNA, 99 bp, Homo sapiens
gacagggaaggctttctcgctgagtccagcccccagactcagagggccccctactcaggaccccaggtgattgtgtccaggggggggcgctttctggaa

SEQ ID NO: 879298 - DNA, 99 bp, Homo sapiens
agaagaccaaaactgtccagtgtaaagtgaccctcttagatggcaccgaatacagctgtgacctggagatcaatgtccgagttaccaccatggatgcag

SEQ ID NO: 879299 - DNA, 99 bp, Homo sapiens
aattctgcaaagaacatggctttgccggatggtttgaaacctctgcaaagatttgcagagaggtgcctaccaccctgaaggaatgcatccaggagccca

SEQ ID NO: 879300 - DNA, 100 bp, Homo sapiens
cagccgcgtctgggccaggagaaaagggttctgcagcattccagaccttgagcactgaatcaggatgggaaaaagacgttgtgttcctccactcgagccc

SEQ ID NO: 879301 - DNA, 99 bp, Homo sapiens
ctgaggaacaggacacatttgtttctgtgatttactgttctggcacagacaggctgtgtgcatgcaccaaaggtactccaaagattcaggtttactcac

SEQ ID NO: 879302 - DNA, 99 bp, Homo sapiens
ctcagtggttgaatcataggcaagtggtgtgtggcacaaaatgcaacacgatcacttcagcatcggtgaggttggtctctcaagaacccaaagctctgg

SEQ ID NO: 879303 - DNA, 99 bp, Homo sapiens
ctcacggacgacctcattgacgtgacgacagcatgtacgatccctgaatgggcccgtgggcatatttagtcattcatttttgatcaggagaaagaagac

SEQ ID NO: 879304 - DNA, 99 bp, Homo sapiens
gctccaccccttccacgtcatccgcatcaacaagatgttgtcctgtgctggggctgacaggtaactcacgtagtgctccacctacacgagggcccccgc

SEQ ID NO: 879305 - DNA, 99 bp, Homo sapiens
aagcgaaacagcacactgtttgaataaagagcgagaactcaagaaagatcttcattgtcaccatttgcacctccagaacaaagatttgaaagcacaaat

SEQ ID NO: 879306 - DNA, 99 bp, Homo sapiens
aagggatggaaatacttcaacaagttggaggtgcagttcatcatcacaggcaccaaccaccactcagagaaggagttctgctcctacctccaatacctg

SEQ ID NO: 879307 - DNA, 99 bp, Homo sapiens
aacaacattgcctacttatttctctcagctgccaacagatggctggaggtcaggacgatatggaagaaagtagcagtgttgccatgttggtgccagata

SEQ ID NO: 879308 - DNA, 99 bp, Homo sapiens
tctgacgagctgcaatttggttatgagaattgggaagcacgtctactgctggagaggtcacatgctgccaagtgcccagacattgccacccagctggct

SEQ ID NO: 879309 - DNA, 99 bp, Homo sapiens
gagtcaccgccaaagacctcagcaagctatccatgggaacttcttgcttactggtgcctatgataacacagccaagatctggacgcacccaggctggtc

SEQ ID NO: 879310 - DNA, 99 bp, Homo sapiens
agagattacaatttgactgaagaacagaaggcgatcaaggccaagtatccgccagtcaataggaagtacgagtgtacttctcccagcagctggtctctt

SEQ ID NO: 879311 - DNA, 99 bp, Homo sapiens
gtgaagtataggctgaggctacctgtgaacagtacgcagtgaatgttgttacttcctcagaatgttggcctcctgtatgttggaggttatgaaagaccc

SEQ ID NO: 879312 - DNA, 99 bp, Homo sapiens
gtcgtatttataatatgtggaggagagagagctcaccatgctcagacttatctaaaaacagactggttgaagttccaatggaattgtgccattttgtat

SEQ ID NO: 879313 - DNA, 98 bp, Homo sapiens
caaatggctgctctctggcgttcctcacactccccctgaagttcatctaagatcttcattcttcaaagcaacacagtcactcctggcggcaaaccaaa

SEQ ID NO: 879314 - DNA, 99 bp, Homo sapiens
aaaatcttagctctctcaatctctgtctgaactggatcataaatgacaggaaaacaatgaagagtcgttatatggaactctatgaccttaatagagact

SEQ ID NO: 879315 - DNA, 99 bp, Homo sapiens
actggattagtatcccactggtgtatacacaggcagtgacatcagtgtctggcccaggtgagcacctccgaaatgccctgtggcatactggccacaccc

SEQ ID NO: 879316 - DNA, 98 bp, Homo sapiens
atgaacatgttctttcccttttggagaatgtatttactcctatgttctgccatagtgatgagttatggctgcagcttcgattgccaatattgtaaaaa

SEQ ID NO: 879317 - DNA, 99 bp, Homo sapiens
cttcactcaatcgagtatcagaagcaacaattgcaaaatcttctccagcaattgccagtatagtaatcatactctgtaattctgttgcaaagcttatag

SEQ ID NO: 879318 - DNA, 99 bp, Homo sapiens
ggtgcccgtggtcaggctggtgtgatgggattccctggacctaaaggtgctgctggtgatcctggcaaaaacggtgataaaggtcatgctggtcttgct

SEQ ID NO: 879319 - DNA, 98 bp, Homo sapiens
agcagttagacggctgccgggcggcggctgccgcgcggcacacaatgtccagagcatccaggtccccaaccaggagttcggcttgagtgagaatgagc

SEQ ID NO: 879320 - DNA, 98 bp, Homo sapiens
ggcgctgcctacggaggtggcagccatctccttctcgactacttctcagagcacctgggtgtctaccggccggtgctggctgcattggaatcgctgaa

SEQ ID NO: 879321 - DNA, 98 bp, Homo sapiens
tttggaacaggcattggaagactgccgtggccacacaagggatcatcttctccacgcccctggccgtcattgcctacttcctcatctggttcgtgccc

SEQ ID NO: 879322 - DNA, 99 bp, Homo sapiens
gcatatcctcagatcccacagtgttcttagatcgccttgcagtgatatttagcctggcaccatatcgagggtggtttccagtgatttccagtctctgct

SEQ ID NO: 879323 - DNA, 99 bp, Homo sapiens
cactctgcaagaaggcaatcctctaaggatcaccagcttctacctataagacttcaactcaagatgcaggtaaagtgttgagagaggagaaccagtgca

SEQ ID NO: 879324 - DNA, 99 bp, Homo sapiens
gccatatactgtccatactgttgtgggtttccatacacttggctccattggccccattgactatagtcaactcagtgcccgcgagtggtctgggttccg

SEQ ID NO: 879325 - DNA, 98 bp, Homo sapiens
aaacctcaggacttgagtaacagcaacatggttgacaagtgtattacgaagacaagatccatgatggctctcttagtccaacttctttcactttgtta

SEQ ID NO: 879326 - DNA, 99 bp, Homo sapiens
ccacagcaggaactgactggcccagggagtggggcaagcagccaggacagcagcatggatcttatcagcaggactcattttcgacaatgaagccaaaga

SEQ ID NO: 879327 - DNA, 99 bp, Homo sapiens
agcactcagtcccggctggacaatgtgatgaagaaacttgcaaaagtatctcatatgaccagtgatttgcctactggctgggaagaagcatatactttt

SEQ ID NO: 879328 - DNA, 98 bp, Homo sapiens
ttcagaggaaggcagctattctcaggatatgacaggggtaacacccttccagatgatttttgagactcctgtggaagaggtccctgctgctattgccc

SEQ ID NO: 879329 - DNA, 99 bp, Homo sapiens
gagaaccgtcagtttgagccagatgaaatatggctacacacacctttctgcaggagagctgcttcgtgatgaaaggaagaacccagattcacagtatgg

SEQ ID NO: 879330 - DNA, 99 bp, Homo sapiens
gtcttcctgtctcaacgatacctattttctagtgctgagatcctgagacaatgcttctggtagatgaattgagagatgcagtgctgctactttttgcaa

SEQ ID NO: 879331 - DNA, 99 bp, Homo sapiens
aatgtgtaacttgcctatcaaagtagtttgtagggcaaatgcagaatatatgtctccatctggttaccattccatcaaatacaatatctgtgaatggaa

SEQ ID NO: 879332 - DNA, 99 bp, Homo sapiens
taatttccccaacttacaatttttgtccattgtccatctgtacaatggaccttactgcatgagtaaggttgctcagacaactgctctcccggatgagga

SEQ ID NO: 879333 - DNA, 99 bp, Homo sapiens
cttgtaaacagtacactctggagggttttaagttatccaatgaaatggagttgcttctgaaagggcctttgaccataagcttctgccctggttcagggc

SEQ ID NO: 879334 - DNA, 99 bp, Homo sapiens
cctgtgggaagtctccatggtgaagtataggctgaggctacctgtgaacagtacgcagtgaatgtttgcatttgcccagtataacatggatcagttcac

SEQ ID NO: 879335 - DNA, 98 bp, Homo sapiens
ccagtgactggggatagtgaaggtgctacggtgcagaaaacgcccactcctggatcttcacattgaactcaatggctacatgtatgattggaacagca

SEQ ID NO: 879336 - DNA, 99 bp, Homo sapiens
tcagagagtagcagctcacataactgggaccagaggaagaagcaacacattgtcttctccaagaaggaccatcgagacctgttcttgaatacatcgatc

SEQ ID NO: 879337 - DNA, 99 bp, Homo sapiens
tttcagaagctttccgcccggctaagagccttgaggcagaggcagctggaccgagctgcggctgctgtggtgcacagccagagaacaacacatcacaca

SEQ ID NO: 879338 - DNA, 99 bp, Homo sapiens
taacttctaaggcctcttcaacaagtacacctgatgacactgctctcaaccttctgaaagaatcaggcccatcaggaattgaaacagagctgcgaagct

SEQ ID NO: 879339 - DNA, 98 bp, Homo sapiens
gaagccaaagctggactcggcagcgtacaagctctattaccaggttttaaacttcgccatgatcgtgtcttctgcactcatgatatggaaaggcttga

SEQ ID NO: 879340 - DNA, 99 bp, Homo sapiens
agcaacttctgttgataagttgggcccaaatattgagaaatcagtgaaggatttgcaacgctgcaccgtttctctaactagatatcgcgtcatgattaa

SEQ ID NO: 879341 - DNA, 99 bp, Homo sapiens
cttttagtggggacacagactaatcttttggcttatgatgtctacaataattcggatttgttctacagagagatcgtctccagcaagaagatcactagg

SEQ ID NO: 879342 - DNA, 99 bp, Homo sapiens
agagatggttgagctcatgttcccgctgttgctcctccttctgcccttccttctgtatatggctgcgccccaaatcagtgttcctggaaaacaatggaa

SEQ ID NO: 879343 - DNA, 99 bp, Homo sapiens
ggacctctaccgagatgtgatgttggagaactacaggaacatggtcttgctgggtactaggttttgacaagcttgcatcatgcgtgagtataagctagt

SEQ ID NO: 879344 - DNA, 99 bp, Homo sapiens
ctcccgcggagccggagccgcagaggctcccgggctggactcaggcttctcagcatcctgaggttagcattacacttctcccagtggagcccatgactt

SEQ ID NO: 879345 - DNA, 99 bp, Homo sapiens
ggaggctccgttgcctgctcccggagggagacgcgctgccgaggagaacccagcggcatgcttttcacttccactgcatctctcgctggctcaaaacac

SEQ ID NO: 879346 - DNA, 98 bp, Homo sapiens
agaacagcttacagaatataatggaacagataattgtacagctcatgaacacaaccaggcagaatccagagaccacatttgaagtatatgttgaagtg

SEQ ID NO: 879347 - DNA, 99 bp, Homo sapiens
aaatcacgagttcaggcgtctgagacttggtgggaacggaccttcctcttagagcataccagaaattcctgatgacctgaagcaactttataaaactgt

SEQ ID NO: 879348 - DNA, 98 bp, Homo sapiens
tcttcttgaaattaggcagactcttcaaaacgcactcattcagtttgctactagaagtgcctagctgccactccatttatatgaggcaagaaggcttc

SEQ ID NO: 879349 - DNA, 99 bp, Homo sapiens
gatgaacagcgtcctggaaaacttcaccatcctccaggcagtttcgctgccatctacatcttcatgctgttcctggtcggggttcctcttctcttcctg

SEQ ID NO: 879350 - DNA, 99 bp, Homo sapiens
ggtgtgtccaattttgctcaacttattgtgagaggtgatttgaagatattaaagctagaaattggaactagaaaatcaaaagaattcaaggcatcttaa

SEQ ID NO: 879351 - DNA, 99 bp, Homo sapiens
caggtaacgagttgtgaagaccagtgcaaacagaagctggcttttcccagaaatacagaaaggaggtgcagagaccacaggaacactcatgaaaaggag

SEQ ID NO: 879352 - DNA, 99 bp, Homo sapiens
gtcggaggcaagctgcgattctgacttcagtgtggttgcatctgttctccatctggtcccttggagacctcatctgtaatcccagctacttgggaggct

SEQ ID NO: 879353 - DNA, 98 bp, Homo sapiens
tgtgctgaaatgtttgacgacactgatggtttgatgtcatttgtcagagtgaaccgctgtggtccccgagttggtgtaagaaagacaccgaaagtaaa

SEQ ID NO: 879354 - DNA, 99 bp, Homo sapiens
gtgcttcttttagctgtttttctgctgttgcctgcttgatatttgcttctctcaccattttatgagcttcctgttcacagtaaaaggctgtcgagaagg

SEQ ID NO: 879355 - DNA, 99 bp, Homo sapiens
ctaagtccttctgcttccctaccactacggtgcgagtcagtctcactggagagcctatggctccgtaaagatcacctgtagtcccagctacttgagagg

SEQ ID NO: 879356 - DNA, 98 bp, Homo sapiens
gtttgtccttctgctattgatcctgaagatattgatgatgttaagaagttcaaaccgggttacctggaagctactcttaattggtttagattatataa

SEQ ID NO: 879357 - DNA, 99 bp, Homo sapiens
ggaaaaacccacaaacatgttcacaacgggcatgggcggcgactggcggcgcgatggacctgaccgggctcctgctggacgaagaaggcaccttctccc

SEQ ID NO: 879358 - DNA, 99 bp, Homo sapiens
gaagagaccaccaaacaggctttgtgtcgctacgcatttcggatctggaaacctctagaacaagttatcacagaaactgcaaagaagatttcaactcct

SEQ ID NO: 879359 - DNA, 99 bp, Homo sapiens
aatcggatctggctataatacccctgctgacatttggagcacggcatgcatggaccctgatgctcccataagacagaaaatgccccttgatgatctgga

SEQ ID NO: 879360 - DNA, 99 bp, Homo sapiens
caaggcactggcagaagaaaacaggaatgtggtggatgggccatacgctggagtcatgacagcttatggtcacagggattatggacccagaacagatgc

SEQ ID NO: 879361 - DNA, 98 bp, Homo sapiens
gtccttccacgacctccgacaggcattccggaagttcaccaagtccgaaagctgccaaggggccaagggatgagctggggccctccttcccaatggca

SEQ ID NO: 879362 - DNA, 99 bp, Homo sapiens
tctcagaaattggctgctgctgtcttctcccttgccataaagctacaaccatccatcatctttatagatgaaatagattatggtgacaagctgaacatg

SEQ ID NO: 879363 - DNA, 99 bp, Homo sapiens
gctgattactatggtcacttgaaagagcctctacttacatttcatctttttgatgcttttgtcagtgtactggcattctctggatattcaacaaataca

SEQ ID NO: 879364 - DNA, 99 bp, Homo sapiens
gaagatcagcgtgtgcgatgccgtcctggaccacaaccccccaggtaactaggatttctacctcaaccgcgagacctatgcaaggacggtgtggaccaa

SEQ ID NO: 879365 - DNA, 100 bp, Homo sapiens
ctgcaacaagtatgttgattacggctcattgaaagcgatatgaccatctggaccaattcctttactaattaatccttgagtaatcaacatacttgttgca

SEQ ID NO: 879366 - DNA, 99 bp, Homo sapiens
tgcagccagtgacctcaaaggatttcagccacaggttcctaaaagtaaagctttagaggccaccaaattggcaattgaagctggcttccgccatattga

SEQ ID NO: 879367 - DNA, 98 bp, Homo sapiens
agtaacatacagcactttgtggagaaagtcgtcttccacttgcacgaaagctttcctaggccaaaaagaggttatcttgacgaatcagattacaaccc

SEQ ID NO: 879368 - DNA, 99 bp, Homo sapiens
accgtgaaaggactcagtaatttgggaaacacatgtttcttcaatgcagttatgcagctgtgttccagatcatctccctggtaatttaccccgtgaagt

SEQ ID NO: 879369 - DNA, 98 bp, Homo sapiens
gagagtagggtgctgtggtctgagctagagggtgaagctggcggagcaggaggatgggcggtaatctgtaagtcagatgctccaacaggggatgttct

SEQ ID NO: 879370 - DNA, 98 bp, Homo sapiens
tccgcggtccggcccggggccccgggatctcggctgtccttcctcccgagcgatcgtcttctgatcaaaggaggtaaaattgttaatgatgaccagtc

SEQ ID NO: 879371 - DNA, 98 bp, Homo sapiens
gatccaaaaataaatgacgctacgcaagaaccagttaactgtacaaactacacagctcatggacgccaggaaagcatgtgcagatgcaactctctctc

SEQ ID NO: 879372 - DNA, 99 bp, Homo sapiens
gaggagatccggatgctcatccataaaactgaagatgtgaatactctgctggcattcctcgttcagtattgaaagattggcgtaaagtcaagaagctga

SEQ ID NO: 879373 - DNA, 99 bp, Homo sapiens
cagcttctgctgtccttctttgtggagagcaaggtgtctttcctgaagactatcttcccgtctcaaaatggacatgatggatccacggatgtacagcag

SEQ ID NO: 879374 - DNA, 99 bp, Homo sapiens
cctctgtctgcctgtgtccctgaccatggctccctgcagtaccctttaacggaagagccagtgaagtggaggtgaaaaatgaaatcgtggcgaatgtgg

SEQ ID NO: 879375 - DNA, 99 bp, Homo sapiens
tttcacagcatcagcagtcatctcactagttatgttcaaaaaaatggagtcccactctgttgcccaggctggagtacagtggcatgatcttggctcact

SEQ ID NO: 879376 - DNA, 99 bp, Homo sapiens
gatggaacacttcagtgcattcaagagtttattaaccacttaacctctcagaactgaacaaagacaacattgttcctggaacgccctctttttaaaaaa

SEQ ID NO: 879377 - DNA, 99 bp, Homo sapiens
cggctgtgggaagagctccctgctggctgccatcgctggagagctccacagccaaggccacctttgatgccatttctaagacctacagctacctgaccc

SEQ ID NO: 879378 - DNA, 99 bp, Homo sapiens
gtgtcaggtggttgcggagctggtaagggtggcccttgggtagggtgaagatcccctgtctttatcctagttccacaccttggtgtgggttactgggtg

SEQ ID NO: 879379 - DNA, 99 bp, Homo sapiens
gtttgacttcatctccataagattgtccaaaatacgagtaacaggtagattcccattctgtgccatcccccgaactccgtgcttctccagctccttcac

SEQ ID NO: 879380 - DNA, 128 bp, Homo sapiens
gcaccgggatcgtgaccgagaccgtgaccgagagcgtgaccgagagcgcgaatatcgtcatcgttagaagaacatggacttcccgtgcctctggctagggctgttgctgcctttggtagctgcgctgg

SEQ ID NO: 879381 - DNA, 99 bp, Homo sapiens
ccgaacgcaagcctgggagcgcggagcccggctagggcttctgcttcagtttacccaacctcagcaaacatcgtttgctttggagaggaacttaaggac

SEQ ID NO: 879382 - DNA, 99 bp, Homo sapiens
gctgtgcgcatgcagcacctggccctggatgtcagcgaccactttccagttgaatttaaactacagtcttcaagggccttcaccaacagcaaaaaatct

SEQ ID NO: 879383 - DNA, 98 bp, Homo sapiens
gctggcggtcccgggtgctgctgtgtctttggtgcaacactaacaaggcttgtctggactacccagttacaagcgtcttgccaccggcttccctttgt

SEQ ID NO: 879384 - DNA, 99 bp, Homo sapiens
aagaaagtgaggaagggaaagcagcaatttcacaactcagggaagtatcaaaactccgctgtcagcttgctaaaaaaaaacaaagtgagacaaaacttc

SEQ ID NO: 879385 - DNA, 100 bp, Homo sapiens
tcctgacagtgttaatggaatcctccactcagcctccaaggcgttctgtctgtcagcaatactgaggaatgcttggttcacttccattaacactgtcagg

SEQ ID NO: 879386 - DNA, 99 bp, Homo sapiens
aacttctactgacgaagcttggaagttgcagaagatatttgatcctgatgacctttattcaggggtcaatttctccaaggtactgagtactcttttagc

SEQ ID NO: 879387 - DNA, 99 bp, Homo sapiens
acagctgacccataatggacattaagacactcttgcactcctgtaatgagcctggcactgtgatgaaacacttttcccgtgtcgtttgagtgcatcttc

SEQ ID NO: 879388 - DNA, 99 bp, Homo sapiens
cctcaaagctgttgtcggagagagttgaaatcacaaagattagacacctttttagataggtgttcttcagcaccactgacaacacggttctgacagtat

SEQ ID NO: 879389 - DNA, 99 bp, Homo sapiens
ttttgtgcagattgccagtctaaaggaacctagaaagattgtacaatgaatggtgattctcgtgctgcggtggtgacctcaccacccccgaccacagcc

SEQ ID NO: 879390 - DNA, 99 bp, Homo sapiens
aaaatcccagatctacctgacgggcctgcgagggttgaagattgtgaagcaatagcctaaggatgagagagacctagagaaagatgatgaactggaact

SEQ ID NO: 879391 - DNA, 99 bp, Homo sapiens
acagtcatcgagaggaccttccacgtggattctccagacgagagtcctggctggtgccttgttagaagaagcggagcaattgctagaccgaggcattca

SEQ ID NO: 879392 - DNA, 99 bp, Homo sapiens
gggtgagcatcgtctgtctccctctctactttccacagttcctttccatgaggcccttgtcctgggcccaccctttagatggccacactctggctttac

SEQ ID NO: 879393 - DNA, 98 bp, Homo sapiens
cccgatggtcttccgtaacctgcgggagaggtttggaattgatgatcaagatttccagacaccaaatggattgcttctgactccgagtccactgctct

SEQ ID NO: 879394 - DNA, 99 bp, Homo sapiens
tagtgaacgtggacaaagctgttgtctcagggagcacagaattatgagttgcagaaacgaattgctgaaatggaaactcaaaaggaaaaaattcatgaa

SEQ ID NO: 879395 - DNA, 98 bp, Homo sapiens
ggtgggagacgggtgaggtacaggctcagtctgcggccaagactccgtcctgcaagtgacaaaaatgctgagtttcttccgtagaacactagggcgtc

SEQ ID NO: 879396 - DNA, 98 bp, Homo sapiens
cggcgcccctgcatgagcaaaagcagatgattgctctgcagtggacaccctgcggtccatgctactccgcagcggcagcgaggatgtggtacagcgca

SEQ ID NO: 879397 - DNA, 99 bp, Homo sapiens
gatgccgcatttccagaaggctgcgactcagctgcgaggccacgccaacaagttgaaatcatcgcagaaggataaagttcgtcagtttatgatcttcac

SEQ ID NO: 879398 - DNA, 99 bp, Homo sapiens
atcttgttggtgcttcctcatgtattgaagaattccaatcccagttcatttttaggaattaaggaatttgcaagagcaaatgaaggccttacaagagca

SEQ ID NO: 879399 - DNA, 99 bp, Homo sapiens
gtgctttcatattttcctaacctgtgtggtctttgtgggaggaataacccagactaggaatgccagcatctgccaagcacttagcagtgtctgcaaaaa

SEQ ID NO: 879400 - DNA, 99 bp, Homo sapiens
ctatgtccttttggcttcgaggtttaccccttccaggaaggtgcttttgcacttgtgtttaaaagtgttcattttcccgggcaagcagttggcacaagg

SEQ ID NO: 879401 - DNA, 99 bp, Homo sapiens
tcaagataccaccggtaactttcatcaatgaaggaaagaattgggatgtgaatgccgccctcagtgattttgaacagctacgtcaagtccatgctggaa

SEQ ID NO: 879402 - DNA, 99 bp, Homo sapiens
ttccagtacacagacgagcatggggaagacggagtcttgccctgttgcccaggctagagtgccaaggcacgatcttggcttactgcaacctccacttcc

SEQ ID NO: 879403 - DNA, 99 bp, Homo sapiens
ggccctctgcgacctggggccctgggtgaagtgctccgtcgcccttgcctccagaaatcgagctatagcagattatcttcgttcaaatggctatgaaga

SEQ ID NO: 879404 - DNA, 99 bp, Homo sapiens
cggaggaggaagtaggggtgcacctcagcactatcccaagactgctggcaacagctgtctgcgagcctggctgtggtgcacatggaacctgccatgaac

SEQ ID NO: 879405 - DNA, 99 bp, Homo sapiens
gaaagtatattctgattgcaaaaaattaattgacacttttgggatccgatggcctgaggagcttgaatgtgacagccaaatttgtatcctactgtgggg

SEQ ID NO: 879406 - DNA, 99 bp, Homo sapiens
gcgggactggctatgagctcacagaggacaatagctgcaaaggaatcaccccaatgctacagctgatccgggccatcctgaaagtccctgaagatccaa

SEQ ID NO: 879407 - DNA, 100 bp, Homo sapiens
tggaacaatcattagttcagtgcctatggagtatgggcactgctggtatttctaaatccctgtcacaagtcagacactgcactgaactaatgattgttcc

SEQ ID NO: 879408 - DNA, 99 bp, Homo sapiens
tactaagcaccgttggtatcctcatggacgcttcatggcggctgaagagatgcattggcctgtccctatgaaggccattggtgcccagaacctgctaac

SEQ ID NO: 879409 - DNA, 99 bp, Homo sapiens
ctaccggcggcggcgcgcagcgtgtcaggcggagagacccgccgccagctgtggaaagaaataacttgatgaggttatcacagagcattccatttacac

SEQ ID NO: 879410 - DNA, 98 bp, Homo sapiens
cgggaaagtggtggaggatgatcttgcggccaaaggggacctcggcgcagtaatgtcaacatgttctaaatggcttctaagaagttgggtgcagattt

SEQ ID NO: 879411 - DNA, 99 bp, Homo sapiens
agggtgagggtcagacggaggctccctttggatgccagtgtcagttgtcaggtgtttgaagtggtggaacgtgtagaagagttaagaaggaagtggcca

SEQ ID NO: 879412 - DNA, 98 bp, Homo sapiens
aataggtgtatcaagtaatggtgcaaagcctgaaagttgccggccttctgatgcttccgctaccagatctcgacctctggccactggaccgtcttccc

SEQ ID NO: 879413 - DNA, 99 bp, Homo sapiens
aaagggaatgacttcattacattcaaaaggtgatgacctatcaacagccattctcaaacagaagaaccgtcccaatcggttaattgttgatgaagccat

SEQ ID NO: 879414 - DNA, 99 bp, Homo sapiens
caaagaagacgtcatcttcttctaaaagggccgtgactcaaggcctcctccggagtggagctgggagactgcaagatcagctatggatcaacgtgttcg

SEQ ID NO: 879415 - DNA, 99 bp, Homo sapiens
aatagacagcaaaagtggtattccaccttcctttataacactacagattaaagactttctgaatggaccagatgttattactttcagaagaaccctaca

SEQ ID NO: 879416 - DNA, 99 bp, Homo sapiens
aggcacagatggaggaggaatacctccgctcccctctctcagggttgcaccaccagcaccaccttccagtagtcagctctgccgttacttccctgcttg

SEQ ID NO: 879417 - DNA, 99 bp, Homo sapiens
aggagccccagttaccgggagaggctgtgtcaaagctcatcaaacggatgattgatgagacatccagtggaggtgtcacaggcaatgacgtcattatgc

SEQ ID NO: 879418 - DNA, 99 bp, Homo sapiens
gagactagcactacttgcattaaaagtctgtatgaatgtaatctgattgaaggggaagatcatgtagaagtaaatggggaagtttttcaaaagccattt

SEQ ID NO: 879419 - DNA, 99 bp, Homo sapiens
gcagcgacatcaccaagctggaggtggacgccatcgtcaacgccgcatttgaagacatgctggagaacccactgaacagcacccagtggatgaatgatc

SEQ ID NO: 879420 - DNA, 99 bp, Homo sapiens
aaggacagcttcagggcccggagtactagtctcaacgagagacccaagagctatgctgtggagcgcaaaattgagcctttctacaagggcggaaaagca

SEQ ID NO: 879421 - DNA, 99 bp, Homo sapiens
gctggatctgtaactggtgtcttggcaaagaccgtgaagatgtctgctaggcccccattaccttaataattctgctgctaaaacggtaacagaggtagt

SEQ ID NO: 879422 - DNA, 99 bp, Homo sapiens
ggtaacctagacctgaatgggcttgaccatctcacaactgctcgcgtgacgaccgcattcgtggcaggcaaatgaagaggattcttccagttctctagt

SEQ ID NO: 879423 - DNA, 99 bp, Homo sapiens
gaagaaaatacaaatcacacgcataatggatgaaaggaaccgacaggaatcccgttctgcttccagaagtggaagtgctcacggatcggggaaatctgc

SEQ ID NO: 879424 - DNA, 99 bp, Homo sapiens
ttggagctaatcggcgcacagaaattatagaagatttggccttctactctagtacagtagtatctctattggtgcgtatagcagcaaaattcatcattc

SEQ ID NO: 879425 - DNA, 98 bp, Homo sapiens
agaatgtgcccaggcttataaagcaatgaataaatttggtgaagcacttaagaaatgtcatgagattgagagagtggtttgtgatgaaaatggttcca

SEQ ID NO: 879426 - DNA, 141 bp, Homo sapiens
cagagtgaagtgaaaatagcaaacaatccaggtggcagggagtgcatcaaaggtgtgaacgcaggaggcaagatccaaatggagatggagactgtttcagaatcaggaacacatgaaggcttgttcagtcatcaaacctgg

SEQ ID NO: 879427 - DNA, 100 bp, Homo sapiens
gtacaccccatcccagacgaagacagtccctggatcaccgacagcactctgtctgtgctgtcggtgatccagggactgtcttcgtctgggatggggtgta

SEQ ID NO: 879428 - DNA, 99 bp, Homo sapiens
cttcgaaacctgctataaccccaaaggtgaggtcccagcttgaagagaaagaaaacaagaagttccctgtgtttaaggccgtgtcattcaagagccagg

SEQ ID NO: 879429 - DNA, 99 bp, Homo sapiens
tgtttcacagtatgggatgttggtggtcaagatagaattaggcctctctggaagcattacttccagaatacccagggatctggacaactctcctctgtc

SEQ ID NO: 879430 - DNA, 99 bp, Homo sapiens
cagtcggcctgcagggctgccaggcctgggctctagtacccaaaaggtcacccaccgggtgctgggccccgtcagaggagcacctgggagctgtcagac

SEQ ID NO: 879431 - DNA, 99 bp, Homo sapiens
gtcgctcttggcacctctgatgaattcttccaaggacagtttgccttcacggcatactcggtgtctgtggctttatgcacacatcgcttgcacactgag

SEQ ID NO: 879432 - DNA, 144 bp, Homo sapiens
agaaagacaccagcatgaaggacatgcgcaaagttctgagaacattacagcagatcaagaaatccagctcaattgcacgtgcattatttaatcacatagacaagtcaggattgaaggatagttctgtcgaagaactcaagaaaa

SEQ ID NO: 879433 - DNA, 98 bp, Homo sapiens
taccgtcatattccacccattactaagcatcctatggctctactttgagacgggtacctgggtgtatcctgtgtttgccaaactcagcctcttgggtc

SEQ ID NO: 879434 - DNA, 99 bp, Homo sapiens
ttccacacctgcaccatccacggaccacagctcactttccccaaggaccagcttgacgaggcctggactgatcaagactggtgccccgtgccgttctga

SEQ ID NO: 879435 - DNA, 99 bp, Homo sapiens
tagcatacattatgctgccgcctatgggcacaggcagtgtctggaattggagaaatcaatggttctgccaattatgagatgtttatatttcacaacgga

SEQ ID NO: 879436 - DNA, 99 bp, Homo sapiens
gattgccacttgatgccgccaaactgagcgtcaccctggacccacagtcggccagtgggtacctgcagctgtcagaggactggaagtgcgtgacctaca

SEQ ID NO: 879437 - DNA, 99 bp, Homo sapiens
aatgatatgactgtttggagtgaagaagtagaaattgaaagagaagtgctcttagaaaagatgccttcaattaagttgcagagttctgatggagagata

SEQ ID NO: 879438 - DNA, 99 bp, Homo sapiens
gaggaattaccaaggaggcaggaggtggagcaaaacacaccaagcctggtgccaatcattgacaatattatgacatcagactgcgggttcgggctgaat

SEQ ID NO: 879439 - DNA, 99 bp, Homo sapiens
cgggggctgctgcaatgacgagggcctggagtgtgtgcccactgaggagtccaacatcaccatgcagtgaactttgaggcgctgatcatcaccatgtcg

SEQ ID NO: 879440 - DNA, 98 bp, Homo sapiens
cttgaatgttgaagatgtccttaccagctttgacaatacaggaaatgtttgtgagcctgaatttaaatacattgggaatatgcatgggaatgaggctg

SEQ ID NO: 879441 - DNA, 99 bp, Homo sapiens
cggcgccgcggcccgcctggcctgcagcgctcccacccccggcggcggcacgatgccctttgacttcaggagcatgaagcgtgccagctctctgaatgt

SEQ ID NO: 879442 - DNA, 99 bp, Homo sapiens
ctgctgacctggggaggccattggctctatggaaaacactgatcttgctgggtcagaaatacaaccactctgtggactggtggtccttcggggttctcc

SEQ ID NO: 879443 - DNA, 98 bp, Homo sapiens
aaatgctgtggcatctgttgtcgcaggtatattggttatcaatactctggctgaccatcatcatcgtgggactgactttggtggaagtccttggttac

SEQ ID NO: 879444 - DNA, 99 bp, Homo sapiens
gagaaacttggagagtggaatgagaaagtgacccagtcagacctcttcctccatacagtggaacagttctgtgtggcacacaggctgtggataaactac

SEQ ID NO: 879445 - DNA, 99 bp, Homo sapiens
tgcccggccgcgtttcctactctttaagctctgttagcttggcctctgtccctgaaggtctcctaaaaacccagaacagaagatcattaagagagtgat

SEQ ID NO: 879446 - DNA, 99 bp, Homo sapiens
tcacaatgggcagggcctggggaatgcttttttatctcatattagtgcctgtgatggcatctttcatctaacacccttagattgtaagcaaaagaaatc

SEQ ID NO: 879447 - DNA, 99 bp, Homo sapiens
cccaaagccacctcctctggttccccgagcagacttgcctgcatgatccacacggatctgacgaccatccagagaatttaagcattccacagcatcaga

SEQ ID NO: 879448 - DNA, 99 bp, Homo sapiens
caaagtgctgggattacagatgagccgacacccgcactgccaggatccaagatgcagggctggtgttggcagacacgctccggaaattcttattcgatc

SEQ ID NO: 879449 - DNA, 99 bp, Homo sapiens
caggaactggttctgccagcaaacgctgggtttcctgagcttctcgaagttttgccgtggtgctttgctgaagagcctgttgttcttgatgctgttgct

SEQ ID NO: 879450 - DNA, 99 bp, Homo sapiens
gtgtgaggagaatggatcatcattgtgtctgatgatgattattctccaccgtctaagagaccaaaggccaatgagctaccgcagccaccagtcccggaa

SEQ ID NO: 879451 - DNA, 99 bp, Homo sapiens
gagggagtcaccatcttcagagggtgcgtctactggtaaatatctttcctaaggacagatctgccaaggggattgtcagcctggggagccatggcaaca

SEQ ID NO: 879452 - DNA, 98 bp, Homo sapiens
ggaccaccactttccatcatgccccaattttctagaccttttgtccccgggcaagtttttgaaatcatgaatcctgtttatagtcctggatcttctgg

SEQ ID NO: 879453 - DNA, 98 bp, Homo sapiens
aggaaaagagggaaagtagccagcaatgtcgaacgctcaggatggctaaaggtgaccccaagaaaccaaagggcaagatgtccgcttatgccttcttt

SEQ ID NO: 879454 - DNA, 99 bp, Homo sapiens
aacggacaaaacctccaccaccggcagcatcctgaatcttaacctggggaaaagcttcactctgaccatcactgtcttcacaaacccaccgcaagtcgc

SEQ ID NO: 879455 - DNA, 146 bp, Homo sapiens
ctcaatccatggcttgtgcttgttggcctgcacatcctggggctgtgtccatgacagccccaggatgtgcaggccaacaagcacaagccatggattgaggcagagtaccagggcatcgtcatggagaatgacaacacggtcctact

SEQ ID NO: 879456 - DNA, 99 bp, Homo sapiens
gggtgacagagtgagactccatttcttagctgccaatgtgttcaggcgtgatgactcggtttctgtttctctgaacatcaatactagggtctgtataat

SEQ ID NO: 879457 - DNA, 99 bp, Homo sapiens
aaacaagacagttctgtctgcagaagcccattatggctgtaactggagatgacacagatttcaacactacacttgcacaatgtctttgaaaccaagagt

SEQ ID NO: 879458 - DNA, 99 bp, Homo sapiens
ctgtgatacaaggagatatttgcagtaattcttgatttacatgaataccttccctgcaattaggaggaggatcaagggttatttcagctagctccttct

SEQ ID NO: 879459 - DNA, 99 bp, Homo sapiens
gaggacctgtgcaacaacctcttgaggatcgaatcttcactcccgctgtctcagcagtctacagcacggtggcacaagaatggctcaactctccaaata

SEQ ID NO: 879460 - DNA, 99 bp, Homo sapiens
tccactgtgcaccatggtccagcggtggctgctgctgtcctgctgcggagccctgctcagcgctggatatcttgctgtggcggtggttaggagatcaga

SEQ ID NO: 879461 - DNA, 98 bp, Homo sapiens
tcgtcggtgttctgcaaagactgcaggaaggcagaagctctccggaggatccaggtggtgcatgcatttgacatcttccagatgctggatgtgctgca

SEQ ID NO: 879462 - DNA, 99 bp, Homo sapiens
gaatgaattacagctctcagatgtcccaaggacctattgctatgcagatgtgttcagagcaacattgttttgttgacacaagcatttagaagaaagttt

SEQ ID NO: 879463 - DNA, 99 bp, Homo sapiens
atgcacagcctggcgacggctgcggggaaggaaagatacaacttccccaacccaaacccgtttgtggaggacgacatggataagaatgaaatcgcctct

SEQ ID NO: 879464 - DNA, 99 bp, Homo sapiens
agcacagaagagggagaagtggctgctctgcgcctcacggccagatcccaggatccagcattcggaggcaaacatgaagctccatcctctccaatttcg

SEQ ID NO: 879465 - DNA, 99 bp, Homo sapiens
gcctgacttctggctcattgtccgggtcctgcaggaccgtgtggaagtgtatgcacatgcacggtgggtccacgtttcatgtgctgtggcaattctgga

SEQ ID NO: 879466 - DNA, 99 bp, Homo sapiens
agggagcatagctgctacactgaagatgaagcaaggcccaatgacccaggcgcatgaagaggaaccacctcagaatatgaaaccacaatcaggaaacga

SEQ ID NO: 879467 - DNA, 99 bp, Homo sapiens
cttgacccccacaatgtggactacctattgggatcaccccttctgtgtcattctctgaggaaaacaagttcttctcaaggaggaaagtctgaacttgtc

SEQ ID NO: 879468 - DNA, 99 bp, Homo sapiens
aagccgagaaggagaacaccccgagcgaggccaaccttcaggaggaggaggagatcatgaatcagacagataaaaatcaacaagaaatcccatcatacc

SEQ ID NO: 879469 - DNA, 98 bp, Homo sapiens
gaaaaacctcaaaatatgatggtggttggacagtcagcatttgcagactttgtcaccaggagactaaagtccatcaaaaacatccagaaaattaccaa

SEQ ID NO: 879470 - DNA, 99 bp, Homo sapiens
tcccaaagcgctgggattacagaaatgaatactgcattgagggacggacttctggtcttcttcttcctaattgttccccttattgtctgtgctattttt

SEQ ID NO: 879471 - DNA, 99 bp, Homo sapiens
ggaactactacgaacaatggggaaagcttacagactgtgtgatttcctttcctggatgaaaatgttgtctcctttctaaattctctgccgatttgggaa

SEQ ID NO: 879472 - DNA, 99 bp, Homo sapiens
ttgttggagatttcatgaatcgaagaggtgactatgatgacccaaaggtcctgactttttggaatgcccttcttcctccttggctggcaatcaatcttt

SEQ ID NO: 879473 - DNA, 99 bp, Homo sapiens
ctcccgagtagctaggattacaggttcaaggacgcccacagaaaacacagagtatcatcatcttagagtcccatatcatctgctgcacgttgagcacaa

SEQ ID NO: 879474 - DNA, 99 bp, Homo sapiens
tgtgccccaggtgaaggccagtgctctcaagctggtagcagtgtttgatgagcaggatccacatcacggaggtgatggcaccagtgccagttccacggg

SEQ ID NO: 879475 - DNA, 99 bp, Homo sapiens
tgatccccaaggcagggtgagagttccccatctgaggcgtttgttgcagctacctgcacttctagataacaccttccaccatgaccacctcagcaagtt

SEQ ID NO: 879476 - DNA, 99 bp, Homo sapiens
aggatttaactatcagaatgaagatgaaaaagtcaccttgtctttccctagtactctgcaaacaggttatgatgtgattgctcaagcccaatctgggac

SEQ ID NO: 879477 - DNA, 99 bp, Homo sapiens
ctaagccatgcacctctgtgggggcaatgggctgctgacccagacagaccctcgagatgcccctcctccaactcgtgctgaaacccgagaggagcgcat

SEQ ID NO: 879478 - DNA, 99 bp, Homo sapiens
gtcccatcactccaaggagagaaggcttctgaatgcttatgatgaacatcaaacactcctgaaagaacaggattctttaaaaaggaaagcagaaaatgg

SEQ ID NO: 879479 - DNA, 99 bp, Homo sapiens
cagctgccctcttgggtttaggtgttgttccttcacggaatccatgcctgtaacagagctgaaatatgagtaaactttctggccatccgagttacttca

SEQ ID NO: 879480 - DNA, 99 bp, Homo sapiens
gtgacattctttccaggttccgaaacaatgtggctatttgatggcacagctgcctcaaaactatcctgccacatggccatcttgatcctatcttcaccc

SEQ ID NO: 879481 - DNA, 99 bp, Homo sapiens
tatatttggacttcaaattggacccaggagccaaacattcccaacctatccctaaagaggttggagcaatcactgaagaaactgaagcctgtgattggt

SEQ ID NO: 879482 - DNA, 98 bp, Homo sapiens
atgaaccaacgttagaagcagcctggcctcatctacagaatgaactctggaagcccagccagggacaatgcaccttcacagagattctgcactaatct

SEQ ID NO: 879483 - DNA, 99 bp, Homo sapiens
gcccttccattttgccctgaaagtcccagatttttgctcattaacagaaaagaagaggagaatgctaagcagattaatgtggagctcaaatatgcctta

SEQ ID NO: 879484 - DNA, 99 bp, Homo sapiens
tctcccctttactccctggatgttcttgccgatgcttctcaccgaaggtgttcaccagcacactgctctgccagatattcctatcattccggatctgga

SEQ ID NO: 879485 - DNA, 99 bp, Homo sapiens
aaagcgttggagaggtgttaccggaacggcggcgacaagggtgttcccgaactagagtgggtgtggatgaggtcaccattgtcaacattttgaccaacc

SEQ ID NO: 879486 - DNA, 99 bp, Homo sapiens
tagatttgaagcgcttcaaaggaccggacccagagaagaggaaaactctaccggtgcaggtacaagaaaattccccaggacacagagctggtttggagc

SEQ ID NO: 879487 - DNA, 98 bp, Homo sapiens
ccggagaccccgaaaacggaagcgcagggagaaggaagaggtgtttgaaaaggtattactcagcacagaaattcaggagacacagacaagttcttcca

SEQ ID NO: 879488 - DNA, 129 bp, Homo sapiens
cgcgcagggtcgcgatgctgcccggtttggcactgctcctgctggccgcctggacggctcgggcgctggagatgagcaatgtgaagagactacggccacggctcagtgctattctctttaagcttcagt

SEQ ID NO: 879489 - DNA, 122 bp, Homo sapiens
ctttctcaactatcatatgtatgttcccaaaaggctgctccacaatggatgtgcttgtggagcagccttttgggaacatacatatgatagttgagaaagacacatattctgatcatgaagaa

SEQ ID NO: 879490 - DNA, 99 bp, Homo sapiens
caaggttcatttatgttcatgctctgaacagcaacatggggtgcaaagtcctgctcaacattgggcagcagatgctgcggcggaaggtggtggactgta

SEQ ID NO: 879491 - DNA, 99 bp, Homo sapiens
cgggctgcgggaggggaggagagcagagaacgtccccaggtataccggacactacttcataaccactttactctactccttcttcctgggatgttttgg

SEQ ID NO: 879492 - DNA, 99 bp, Homo sapiens
ttctccatcattgtcaccctggccctcgcggtggctgcctttaggaaatcctcattgacgattcaatttgttgaaggccaatttgtggactcctacgat

SEQ ID NO: 879493 - DNA, 98 bp, Homo sapiens
gcttgggagcccggaccccgccccctgcggcccagcgcccccagactggtcaaacaaatggattttacagaggcttacgcggacacgtgctctacagt

SEQ ID NO: 879494 - DNA, 99 bp, Homo sapiens
gcttaccccggggtctatggaagtaatggaaggacccctcaacctggatgaagtcattgctgtttccgaaaaggtgattgtgaagcttgaagacctggt

SEQ ID NO: 879495 - DNA, 99 bp, Homo sapiens
ctggagctgatgaaccagcatgacacggagatgaagtactatataggatgaatttttagatgtgatctactggttccgacagatcattgctgtggtcct

SEQ ID NO: 879496 - DNA, 99 bp, Homo sapiens
cacacagtaaatccagcaaggatatggagagccatgttttcctgaaggccaagacccgggaatttggtgcattgatgagcaattactctctccccccac

SEQ ID NO: 879497 - DNA, 99 bp, Homo sapiens
ttcaagtctgccctgcaagcgataggagtggaagcccaccaggaatcccttggcaccatgtcctgtgtgcattataaattttcctctaaactcaactat

SEQ ID NO: 879498 - DNA, 99 bp, Homo sapiens
gtaagaaacaagaaggaactaattgacaagaatgtgctcaccgacaatgaaacatctcctcatggagcttgagttcttgagctagacacagcatgctga

SEQ ID NO: 879499 - DNA, 99 bp, Homo sapiens
ggagatggtcaagaatcgctctataagatctgcaagctctaagcgaaagacatgaggcctcagcctgaaatgaggttgttttgaggtcatctgatttct

SEQ ID NO: 879500 - DNA, 99 bp, Homo sapiens
ccctctccccggggcctggccgcgcgctgctgtgttctggaagggctcattgtacagtcaaggcggcaggtttattacccagaactctttgtctgggtc

SEQ ID NO: 879501 - DNA, 99 bp, Homo sapiens
gtactggtttaggtactggtttgggaactggactgggatttggaggatttaatacacagcagcagcagcaaactaagattaaaagctgctttgacccag

SEQ ID NO: 879502 - DNA, 99 bp, Homo sapiens
tgcatactatcctcctagccaaattgctcaactaagaccaagtcctcgctggactgctcagggtgccagacctcatcgatggtgccatgacaatggtgt

SEQ ID NO: 879503 - DNA, 98 bp, Homo sapiens
accatttttactaaggagactgaagaaagaagttgaatcccagcttcccgaaaaaagttgtcaggggagtgtccattggcagcacctgcctcctgagt

SEQ ID NO: 879504 - DNA, 99 bp, Homo sapiens
aggaggagggcgactgtatgatcgtggatgtcccggatgctgcggctggtcagtgagaaggtcggaggggccgaggggaccaagctggatgatgacttc

SEQ ID NO: 879505 - DNA, 99 bp, Homo sapiens
ttccacccttggccacctccccaggtgatgcctgaagctcaagggactgtgtccaccctcaggatcatccagcagctcgtcaacggcatcatcacgccc

SEQ ID NO: 879506 - DNA, 99 bp, Homo sapiens
atttcttttgtgcaagatgagcctcaagtgcttctgcattacagtgaccattgtgaggtagatattttgttctaattttccagatgaggaagctgagac

SEQ ID NO: 879507 - DNA, 100 bp, Homo sapiens
gcggaggtggtgtttgtgaaaaaggacgatgccatcaccgcatataagaagtacttatatgcggtgatggcatcgtcctttttcacaaacaccacctccg

SEQ ID NO: 879508 - DNA, 99 bp, Homo sapiens
gacgtctagtccacaggaagacctgcaccactgtcgccttcacacaggtgactcagttgttgtggctcctgcccagacactctccaatgccgagtttca

SEQ ID NO: 879509 - DNA, 99 bp, Homo sapiens
ctgaagtagcaaaggcaagaaggcaacgacgttccatctgtggaaggacctaccaaccagtctctccagttcttgttagatacatgtaaagttctagtc

SEQ ID NO: 879510 - DNA, 99 bp, Homo sapiens
cttgacctttaggtgcttttatattcatctcaaaaacaaaattctgaactcaggacttggcaagttgtttttcaccattcagaacattgcctgaagcag

SEQ ID NO: 879511 - DNA, 99 bp, Homo sapiens
tagccaagaggttgggcggatgttgtgagccgggtcgctgcggccgaggctccgggtttttcgttggaatatacgttgcacatttatggcgattctgag

SEQ ID NO: 879512 - DNA, 99 bp, Homo sapiens
tgggcggtgccggcgccggagacgatgccgtttcactgcttcaaccacctgtgagaaattagaaaaagccaggaatgagttacaaacagtgtatgaagc

SEQ ID NO: 879513 - DNA, 99 bp, Homo sapiens
cgaatatcgtcatcgttagaaggaatgaaatggaaaggcattttctggagcttcttcagtttaatattaatgttcctgccagtgtttatgccaaatact

SEQ ID NO: 879514 - DNA, 99 bp, Homo sapiens
attataaagagcctttctggaggaaaaaggccgattacaaggagagctttaatacgattggaaacattgaagagattgcatataatgctgtttccttta

SEQ ID NO: 879515 - DNA, 99 bp, Homo sapiens
caaaacgttggggtacagctcatggcagtatcgttccttaccagaaaacgttgtgtgacgtgatcctcatggtccaggaaagaaagatacctgctcatc

SEQ ID NO: 879516 - DNA, 99 bp, Homo sapiens
ctgagacttggtgggaacggaccttcctcttaggttggtcaaagaaaaagtgatgtatgaaaaagaggcaaaacaacaagaagaaaagattgaaaaaat

SEQ ID NO: 879517 - DNA, 98 bp, Homo sapiens
gctgccgccacctggtggtttgtgtatgacgccgagggacctcacatcaacttctaccagctgatgcgctgcctgaccacgcctatgctgctgcgggc

SEQ ID NO: 879518 - DNA, 98 bp, Homo sapiens
tggttcttcatcgtgctattcctggtctacatcctgcgggtgcctttgaaaatcaacgacaacttgagcacaggtgcccgagaatatcatgtccagtt

SEQ ID NO: 879519 - DNA, 98 bp, Homo sapiens
ctatgatggaattgcggaagtgctgcaatcatccgtaccttatcaatggcttcaacgtggaaaccgtggagtacaagaacatcagcttcactgtgtgg

SEQ ID NO: 879520 - DNA, 98 bp, Homo sapiens
ggattgtcgccgtgcacatggctggaggagcgtctctccgccactgcgcacattttgcagcctgcaccggccaacgcatgcagcagaactgattaaaa

SEQ ID NO: 879521 - DNA, 99 bp, Homo sapiens
ctgcagtttttgcttctgagcaatctctgactgggtgacctcagccacatttagcttctcactctccagtttctcatacattttgccttcgtctgataa

SEQ ID NO: 879522 - DNA, 99 bp, Homo sapiens
ataggtcctcagcccaggtggtggccgaaatgttattttaacgaggttcgatacaagaggctgttttcctagcgtggcttgctgcctttggtaagaaca

SEQ ID NO: 879523 - DNA, 75 bp, Homo sapiens
atgaacggggagctcgttctccggaaggagtttggagacacggagctgacgcagatgttcctacccttcggcaat

SEQ ID NO: 879524 - DNA, 99 bp, Homo sapiens
ggagatgaacctctaacacagtggaaaggaaccgttctggatcagattgagaggatccagaatccagatctctggaatagctaccaggcaaagaaaaaa

SEQ ID NO: 879525 - DNA, 99 bp, Homo sapiens
gaactcgtcatgctctttgtagcgtggtgcttctgttgctcacagcttcggaaccaaaaagaagcttcccagagccggggccaggagccccaagcgccc

SEQ ID NO: 879526 - DNA, 99 bp, Homo sapiens
ctctcataatattctcttatgttcgccatattgcaggattcctgggggtgtggctaccatactgtgtctcttcatattccagggatcttttccttgctc

SEQ ID NO: 879527 - DNA, 99 bp, Homo sapiens
aactagagaaggaaacgggactaaactggcgggctccgtggaagcgtggccggcagcgtcccggacgaggagggcgaccattgacgaggtggagacgga

SEQ ID NO: 879528 - DNA, 99 bp, Homo sapiens
cgcaacctggcagccgccgccgtggaaggtagacgttacatccaagaggaaataatccaggcaaggaagcacaagctgatcaagatgtgtagttctgtg

SEQ ID NO: 879529 - DNA, 99 bp, Homo sapiens
gacttcccccggccagagcaatggccgctgagaacagcaagcagttttggaagaggagcgctaagctgccggggaggctggagtgcagtggcccgatct

SEQ ID NO: 879530 - DNA, 99 bp, Homo sapiens
gggggaagctctcccagctctgaataatctctctttggacactgcacatcatatgctattttattaatgacaagtttaaaatcattcattagcaaaata

SEQ ID NO: 879531 - DNA, 100 bp, Homo sapiens
cttgaggagcgggggactgggaagaggtgtcatctgttttgggtcttatggaggccggaggctcagaggagaccagttctcgtttctgaagtctcctcaa

SEQ ID NO: 879532 - DNA, 99 bp, Homo sapiens
gacaagtggtccaggatctgttgaaggttcttgatagtccacaatgggtgaaccacagcaagtgagtgcacttccaccacctccaatgcaatatatcaa

SEQ ID NO: 879533 - DNA, 99 bp, Homo sapiens
gccattcaaactcctccccacgacactctgaagcagcgacggcacagcgggaagaatgatcaagcttctgaaattcaggtgacaatgatgctcactgaa

SEQ ID NO: 879534 - DNA, 99 bp, Homo sapiens
tcgactctcaaagcaataccaggatagctgttgtttcagagaaagttttctggatatgccgcagaaggatccgtgccagaagcaagcctgtgagataca

SEQ ID NO: 879535 - DNA, 99 bp, Homo sapiens
ggataaacagcttcaagatgaactggagatgctcgtggaacgactaggggtagtgtcagtggctgagtatcaccgcaggatcgatgctctaaatactga

SEQ ID NO: 879536 - DNA, 99 bp, Homo sapiens
ctatcccgaagcaaaggtcatcttctgtatcactgactcaccatgtaggtctcagaagagctggcacttcaaaaaacgtatcagaagatacttcgagaa

SEQ ID NO: 879537 - DNA, 100 bp, Homo sapiens
agagccagcaagatacattccctcaagtgtccagaatttccaattatgtcgtctgtaattggaaattctggacacttgagggaatgtatcttgctggctc

SEQ ID NO: 879538 - DNA, 99 bp, Homo sapiens
ggagatccatagggaagaaggcggaacatccggaggctgggaaatggcaattccatcgcctccatcccagatgaagcatttaatggattaccaaatttg

SEQ ID NO: 879539 - DNA, 98 bp, Homo sapiens
cacagaccattgcaatggaaatggtggtttgaagtgtcctgtttgcagctttgtatatggcaccaaatgggagttcaataggcacttgaagaacaaac

SEQ ID NO: 879540 - DNA, 99 bp, Homo sapiens
ccagcaatgccaagatctgttgtgaactcccccactggaaaggattctgaaagaaatgaagtcagccctcagaaatgaagttgactgcctgctggcttt

SEQ ID NO: 879541 - DNA, 99 bp, Homo sapiens
aagacagacagctcagaagttccatagaacgggttattaacatatttcagagcaacctctttcaggctttaataggacatagctcgccttttgcaagaa

SEQ ID NO: 879542 - DNA, 98 bp, Homo sapiens
tatgctaagaggcatcatcatgaagctacttacaccaagatgaagataatttattagttcaggaagaatctgcattctgaagacaaatagaagttcca

SEQ ID NO: 879543 - DNA, 99 bp, Homo sapiens
gccagtctgagagagacatcctctctctttcgcgctctctctttctcccgctttggaagaggcggaggaaatcgctttcttccctgtgactcagccctg

SEQ ID NO: 879544 - DNA, 98 bp, Homo sapiens
acgtggtgacccgctggtaccgagcccccgaggtgatcctcagctggatgcactacaaccagacaggaaactcttatcactactattgattctagttc

SEQ ID NO: 879545 - DNA, 99 bp, Homo sapiens
accagcacgtgagggttgtctgaaggagctgcagcttaaaggcaagttcatgcttgagagctctgaggtcatccagctgctgccgaagagataccaggg

SEQ ID NO: 879546 - DNA, 99 bp, Homo sapiens
cccagacggctcacctgtgcgggatggaacaaaaggtgctcagagccagaccctggtttgaggagccccccaaggctgtggaactggaggggttggcgg

SEQ ID NO: 879547 - DNA, 99 bp, Homo sapiens
gtttgaaacatttgtcacatgagccaaatacattaacgagaaaggtctgatcacacatcttttacccaagataaagctgtactttgcgaacaaaggatg

SEQ ID NO: 879548 - DNA, 99 bp, Homo sapiens
cggccccgagtggagggcaaacctgtgaacccacccgagagcaacaaagcaggcgactacagccacgtgaagattgcagagggaatggcatacatcgag

SEQ ID NO: 879549 - DNA, 99 bp, Homo sapiens
gaagcgatgccacgggagatggaaccaaggagaaaccatttaaaacaggtctaaagatcctgtttgaccaaactcagagatcaattaaggcacagcttc

SEQ ID NO: 879550 - DNA, 99 bp, Homo sapiens
caagaagatcatcattaaggacggaggcacgctactgcagccgtggaactaagtgttgctaatgaattgtgaatggaagtgatcattcatctccagttg

SEQ ID NO: 879551 - DNA, 98 bp, Homo sapiens
gagtggtgaagctggaacagccagaattggacccgaaaccatgcctcactgtcctaggcaaggttaaaaataagaagttggttgagctgctgagaagg

SEQ ID NO: 879552 - DNA, 99 bp, Homo sapiens
catgtacctcccaaagtctctcacattacttttgctcacgaagttggacataactttggatccccaaaaattttaagagcttgcattgaacaagtgaaa

SEQ ID NO: 879553 - DNA, 99 bp, Homo sapiens
agaaatgtttgggaggcactgtccagactatgaatcaaagttgagaccaagaaattatttctgaaaaaggatatggaaaaccttacaaaacacagcatt

SEQ ID NO: 879554 - DNA, 99 bp, Homo sapiens
ggacgttgagagaacgaggaggaaggagagaaaatggcgtccacggagttcagacgatgaagactgttcggcgaaaggaagaaatcgtcacattgtagt

SEQ ID NO: 879555 - DNA, 99 bp, Homo sapiens
ggagtcggggccccatcgagaaatggccgcgtcggcagtgatgtcttggcattgcccattttcaagcaggaagattccagccttccattggatggtgaa

SEQ ID NO: 879556 - DNA, 98 bp, Homo sapiens
aatctttcgctccctacacaccctggttggacaggtgatttgatgaaggctgctgcaggagagttcgcagatgatccctgctcttctgtgaagcgagg

SEQ ID NO: 879557 - DNA, 99 bp, Homo sapiens
ggatgtcgtctcagcagtgctcgggcgcagaccactatcatggccgtgcagtttgacgggggcgtggttctgggggcggactccagaacaaccactggg

SEQ ID NO: 879558 - DNA, 99 bp, Homo sapiens
cgctactaatgctgcagtcactgtacttagagtggatcagaatggaagtattatggaaggcttagctttatggaaaaataacgtagacaaacgttttga

SEQ ID NO: 879559 - DNA, 99 bp, Homo sapiens
ggaacccttcgctggcgggagcgcggttcggggccgcagaggctatggatgaaatgaatggcaaagaaatagaaggggaagaaattgaaatagtcttag

SEQ ID NO: 879560 - DNA, 98 bp, Homo sapiens
gcctggctcggagcagcagcctctgagaaagaagattggcccatgcacaagctggaatgttctcccatggttgtttttggggaaaactggaatccctc

SEQ ID NO: 879561 - DNA, 102 bp, Homo sapiens
gtcatcaaatgatttggcaacagagagacccttctcagtagactctctctgaagttggcctcagaaggtgagaagggtctctctgttgccaaatcatttgat

SEQ ID NO: 879562 - DNA, 99 bp, Homo sapiens
ctccaaccgcctcctcctcctcagtaacgcggcacaggagaaaacgacgctccacacctttaacttcttccacacttccttcacaagcaacagagaaaa

SEQ ID NO: 879563 - DNA, 99 bp, Homo sapiens
tgcgatctctgtggtaggcccagaattactgggagatgtactcaaagatcggccccaggaagcagatggaatcgattcggtgattgtagtggacaatgt

SEQ ID NO: 879564 - DNA, 99 bp, Homo sapiens
ctgtgtactttgccctcagcatctcccttcatgtctgggtcatgaagacccttttgaggacttctttgggaatcgaaggggtccccgaggaagcagaag

SEQ ID NO: 879565 - DNA, 99 bp, Homo sapiens
gctgtgggaagaaaagcagggtgctggtttctaggacactaaacctcatgacatgcttcagcttatcaacaaccaagacagtgacttccctggcctatt

SEQ ID NO: 879566 - DNA, 99 bp, Homo sapiens
aagtcgtgttctgatcactactgacttgttggtacaccagaggatcgcttcctggcagaatttgggagctgtttattgcagcactgttgtgccctctga

SEQ ID NO: 879567 - DNA, 99 bp, Homo sapiens
ctgtagatgtggctgtaggcaatgttgagaggcccatgacgatcttcaaagtatgccaggctggctttggttaacacaaagaagcggactttaaagttc

SEQ ID NO: 879568 - DNA, 99 bp, Homo sapiens
ctctctggacttgctcccagcatccggaccaaaaccatcagtgccacagccacgacaggaaagaaccggaggctgaagcaggccaaagaagaagctcag

SEQ ID NO: 879569 - DNA, 98 bp, Homo sapiens
ccatgactgctctgcttatactggctggacagaattccagaagattgccatggcaacagcaataggatttgctataatgggattcattggcttctttg

SEQ ID NO: 879570 - DNA, 99 bp, Homo sapiens
cccgggaactgctgacgcttgatgagaaggacccacggcgtctgttcgaaggtcacgagacatgtgtagaactgcttttagaacaggaagttttccaga

SEQ ID NO: 879571 - DNA, 99 bp, Homo sapiens
ggaagacctccagtctataagcccaggaagccgtcttcgaactcaggagaagattagtcagaagaagttgaaaaaatacgagaaagaatatcacaccat

SEQ ID NO: 879572 - DNA, 99 bp, Homo sapiens
cgaggaggagtctgctctgcggagatcatggggacagcctcccaagctgaaggaaggggtgtccgcaatgttgccagtgtctgtctgcagattggctac

SEQ ID NO: 879573 - DNA, 99 bp, Homo sapiens
ggaagaagctcctgccagctcagaggagacctatcagatctatgggagtcgtcagattatactggagaaagaggaaacagaagagctaaaacggtttga

SEQ ID NO: 879574 - DNA, 99 bp, Homo sapiens
tgtagatgagaattttacagaattaagaggagaaatagcaggacctccagacacaccatatgaaggaaagaatacccacctcatgtccaaaaagttgaa

SEQ ID NO: 879575 - DNA, 99 bp, Homo sapiens
gtctggtttaggtgctcttcttttcttcacccagtaaattcacggtagctttcttcgcatatattggggaaaatgtgaagtagttcaggtgacaaatat

SEQ ID NO: 879576 - DNA, 99 bp, Homo sapiens
aggatcctgcgctgagcacgagtcacccgttctacgacgtggccagacatggcattctgcaggtggcaggccggaaggtggtggtcgtacgctgtgaag

SEQ ID NO: 879577 - DNA, 98 bp, Homo sapiens
cctcattgtccaggagatgaagacgagactttcaaagatggaatcacaaacggcgcacattggtatgatgtggaaggctgctatccatgtccagggcc

SEQ ID NO: 879578 - DNA, 99 bp, Homo sapiens
ggctaacatggtgaaaccccatctcgttgtttggagtgccacatggggacagaaaatagccaactgccgcactggctcattgtgagtgttgaaaaagat

SEQ ID NO: 879579 - DNA, 99 bp, Homo sapiens
agacctcattccaagttccaggattaattctggaagctgtagagaaatatgaagaagtgctacataatttggaatttgccaaggagcttcaaaaaacct

SEQ ID NO: 879580 - DNA, 98 bp, Homo sapiens
ttcattgtttgtcaccacaaaaaggacaggagttacttaaagatccactctacattggactacggcagagaagagtaagaggttctgaatatgatgat

SEQ ID NO: 879581 - DNA, 99 bp, Homo sapiens
tcaagagtcataggattagatgatccaagtcaccaagaaattactgtctcaagtgatacgaacatgaaaggctcccggagcagcgctgactcctccagg

SEQ ID NO: 879582 - DNA, 99 bp, Homo sapiens
cgatcagtagctttcccaatagaaaaacctctcctgatttccactggattagcacctttgctaatcttctcgaagccttccttggctatagagcgtgcc

SEQ ID NO: 879583 - DNA, 99 bp, Homo sapiens
tattgaagaattccaatcccagttcattttttggtcccaatcgaggccattatattgcaatagttaagagtcatgatttttggttgttgtttgatgacg

SEQ ID NO: 879584 - DNA, 99 bp, Homo sapiens
tcatggaattgccgaatctcagttacgctacatacaacagggttctgtagctatagctggtgctgttattcgctggctaagagacaatcttggaattat

SEQ ID NO: 879585 - DNA, 98 bp, Homo sapiens
cagtgatgttgatgctagttctgatgctgatatgctaactggtgatgagcaagtatggaaggaagttcaagaatccctgaaaaaaattgaagaactga

SEQ ID NO: 879586 - DNA, 99 bp, Homo sapiens
gtaaatctcccaagtccaaagggagaactatgccatttttgggtcaggactggagatctcctggatggagttggattaagacagaagatggctggaaga

SEQ ID NO: 879587 - DNA, 99 bp, Homo sapiens
gagcgcggaatcggggagcgtccggagctagctggatcctctaggcagttctggtcagcctatgtgccatgccagacccaggaccgggatgccctgcgc

SEQ ID NO: 879588 - DNA, 99 bp, Homo sapiens
gctggaaccacttaatatgttcatctagctcagaatcaaaacaaacagcttcttccccagctttgaaaatcccagtgaagttctagataaaagtcacct

SEQ ID NO: 879589 - DNA, 98 bp, Homo sapiens
tccaggaatgccagtgcatcttttgcacagctgtcattacacctactctgagaatcgtgtggaaaaagacggcctgattcttacaagccgggggcctg

SEQ ID NO: 879590 - DNA, 99 bp, Homo sapiens
ggggacccagtgcgcccgcatcgtcgagcggagctggagtttgttcagatcatcatcatcgtggtggtgatgatggtgatggtggtggtgatcacgtgc

SEQ ID NO: 879591 - DNA, 99 bp, Homo sapiens
ctgctcctcctcgcctgcgaagcatcacgtccgcttcccgacgctgagggcagccccgtccaggatcgagacgctccctccggagctcttccagtgccg

SEQ ID NO: 879592 - DNA, 99 bp, Homo sapiens
atcagaaaatcaagtaaaggaacccaacagagatctcttctgttctccactgctagggtgcccgggaaacatttgagaattactaccgaaaacagaggc

SEQ ID NO: 879593 - DNA, 99 bp, Homo sapiens
gctgttctccaagaggcccagagacatgctgaaacatcgaagcaatcagccatgactgcctttgcactgtccatgctctcagcccaccacctcctcccc

SEQ ID NO: 879594 - DNA, 99 bp, Homo sapiens
ggaaaaaagagaggatttgcttttgtaacttttgatgatcatgatacagttgataaaattgttgttctttatagctccaagctctacagattcttcaaa

SEQ ID NO: 879595 - DNA, 99 bp, Homo sapiens
ctcctgagtagctgggactacagggacccagcctccaacactgccccgctccagccagagcagctccaagtgtttgagactctggaagagatcacaggt

SEQ ID NO: 879596 - DNA, 99 bp, Homo sapiens
catgtgcttggtgtcgtttttccttgagctgaacgtcttgcaacagtggccgcacgcatagatttgtcaaagatgaaagtgaccttatcagctttggat

SEQ ID NO: 879597 - DNA, 98 bp, Homo sapiens
ggggagaccgtaatgagcgtcaaaattatccgaaaccgcctcactggatgaagactcttaagatgacagaaggtgatttttctggtgatcgaggactt

SEQ ID NO: 879598 - DNA, 101 bp, Homo sapiens
atagtacctacagcagcactccagatgcaaataatacggcactccgaacagacactaaaaacagctctcatctcaaagaacccagtgcttgtatcacagta

SEQ ID NO: 879599 - DNA, 99 bp, Homo sapiens
gtgggagtgacccgattttccaggtggctcccggctgcctctgctgcagttcagagcaacttcaggagcttcccagccgagagcttcaggacgcctttc

SEQ ID NO: 879600 - DNA, 99 bp, Homo sapiens
ctggcggtcacaggggctggcagggtgggaagaagagcgctatcctgaaggcatcaagtggaaattcctagaacataaaggtccagtatttgccccacc

SEQ ID NO: 879601 - DNA, 99 bp, Homo sapiens
ttggaggcaagcgctgcccgcgagctgagccgccggaggaggagccgcgggcaacgaggtaaaataccatgaagattttgaaaaaacaaaggggagagg

SEQ ID NO: 879602 - DNA, 98 bp, Homo sapiens
aatgatatctataatcatatgtattcaggggttcagataagaatccaagcaaaaatccctggattgaagcgcaaagctgaatgaaaacgcccaaaata

SEQ ID NO: 879603 - DNA, 99 bp, Homo sapiens
gcctcccaagtagctgggattacagttgataaaaatggtgatgtgtgcatttctattcttcatgagcctggggaagataagtatggttatgaaaagcca

SEQ ID NO: 879604 - DNA, 99 bp, Homo sapiens
gaatggaggggccctttggtggtggtatggaaaacatgggtcgatttggatctgggatgaacatgggcaggataaatgggtctcactctgtcacctagg

SEQ ID NO: 879605 - DNA, 98 bp, Homo sapiens
gcggcgcgccctcctgctgcctccccggagctcccgggccagtagaagtggcaatgcattgaggatacatctggcaagcttcgaattcacaagtgtaa

SEQ ID NO: 879606 - DNA, 98 bp, Homo sapiens
ggccattggaatggacgattccgtcaagagataacaacaaatgttatgcaaaaataatctgtaatactaaagacaatatggagtttcactcttgttgc

SEQ ID NO: 879607 - DNA, 99 bp, Homo sapiens
ggaaattgcacaagccaggaaaggacgcgtcgaagcgcgggcggcaggctcgaaaaattctgcgggaactgaagcatcaaaagcgctgtaaggaagcag

SEQ ID NO: 879608 - DNA, 98 bp, Homo sapiens
accgaagaaagcaaatcatatcatgcaacatttgccagttgagatttaattctgattgatatcagtatcaagataaaagtttggaatgggagaaaaat

SEQ ID NO: 879609 - DNA, 98 bp, Homo sapiens
ccgtcttcccggcgagtccgcgacggtcgccgcccacggcgagcaatggctgccatccggaagaaactggtgattgttggtgatggagcctgtggaaa

SEQ ID NO: 879610 - DNA, 99 bp, Homo sapiens
gtctgaggaggccactttgaaaacctgttctgagaatttctgcctgtccttatagatctcctggccgtgctggtatacaggctacttggagcctggctt

SEQ ID NO: 879611 - DNA, 98 bp, Homo sapiens
tgggttttaatgaagagacagatgctgctcatatacaggcctcaggagtgcaagtagctgatgaagtatgtcgcattttttatgacatgaaagttcgt

SEQ ID NO: 879612 - DNA, 99 bp, Homo sapiens
ttgaaccactggaaagtgaggaattttgaagtacaccgtggtgacattgtatcattggtcaactgaaaaagactgtggatgacctgcaggccaaactga

SEQ ID NO: 879613 - DNA, 99 bp, Homo sapiens
gggaattatataaagacctcatcttgtattctagtgtgtcagtattgggactatttagtccaaccatgaaaacagatggagtcttgctctgtcgcccag

SEQ ID NO: 879614 - DNA, 99 bp, Homo sapiens
acattaaatatgggagcagagaatctgtggaattattgctggaagactggcatttcttcatcctgctgctgattatcctccttgctgaggtgaccttgg

SEQ ID NO: 879615 - DNA, 99 bp, Homo sapiens
aaaatggcggaccgcttctcccgcttcaacgaagaccgagactttcagatgatgaggagtctgatgaggaagctgtgaagaaaaccaacaaatgtgtac

SEQ ID NO: 879616 - DNA, 99 bp, Homo sapiens
gggaaggcaggctatcatttggaataaacacacaacaagattgtacttcaagctgagaacacagtagcataaccaattccacaactgaactactcgact

SEQ ID NO: 879617 - DNA, 99 bp, Homo sapiens
cctgcacaaacccactggacaccttcgtcccctttgatccctgtgtgctgaagagggtgaagcaagaagcatttcatttgcacatctttcttggacttg

SEQ ID NO: 879618 - DNA, 99 bp, Homo sapiens
gggagaatctgggcgtcgctctagaggtcagaagttacgtcaagagagctcttgctgaaggtgcccaaatttggtgcggtgagggagtggataagttga

SEQ ID NO: 879619 - DNA, 99 bp, Homo sapiens
gggcggccggccaggaaccacccgttaagaattataaggctgtctgcagagatttgaaaaatggcaacaaatgaaagtgtcagcatctttagttcagca

SEQ ID NO: 879620 - DNA, 99 bp, Homo sapiens
cttaaccagttatcctaaaaccagtcttcatggctcccattccagtccatcctccatattgctcccagattgtgtctgtaatcccagcactttggaagg

SEQ ID NO: 879621 - DNA, 99 bp, Homo sapiens
gaacttacattagagtgttcaagtcttctgagactccagagtcacctaagctttctacaagttctgattaaagtcagaaatagacacaatgatgtggtt

SEQ ID NO: 879622 - DNA, 99 bp, Homo sapiens
gcagatggacagttgcacacactaggagatctcctcaaagaagtttgtccttctgctattgatcctgaagattttctaccctagcaaggatggtacgaa

SEQ ID NO: 879623 - DNA, 99 bp, Homo sapiens
atgacccaggcctatgccaatcagcatttcacattcctcatggttggttcaaaggggctttgttatgcacctaaagccatattggaagctccagaagaa

SEQ ID NO: 879624 - DNA, 99 bp, Homo sapiens
ctgggcgacagagcgagactccatctatcaaatcgctttctgacttgcttgtctcctttctccctcctgtttgattgtgtaggcagtaataaagtttca

SEQ ID NO: 879625 - DNA, 98 bp, Homo sapiens
gataacactggagatcagcaccaaatcccacagaggcatctgagagttgatctctctaatgtattagatcttcatgcctttgatagtctctctggaat

SEQ ID NO: 879626 - DNA, 99 bp, Homo sapiens
gaaaatagcctttgccatcactgccattaagattgagaggatccagaatccagatctctggaatagctaccaggcaaagaaaaaaactatggatgccaa

SEQ ID NO: 879627 - DNA, 99 bp, Homo sapiens
tttccgaagggaccaccgggaacagacggatcggcagggcggggcggaacgcttccttcaaaatgtctactgttcacgaaatcctgtgcaagctcagct

SEQ ID NO: 879628 - DNA, 99 bp, Homo sapiens
gtaagcggactgcagccgcgagctcctggaggcggcgggatggaggcggcggccggttatcaatactctggctgaccatcatcatcgtgggactgactt

SEQ ID NO: 879629 - DNA, 99 bp, Homo sapiens
ctggccggaaccgctccttggaaggtcgctgggaggtggcattcaaagattgcaaaggtcgactgcaaggaagtactagacatcatttgtaatctggaa

SEQ ID NO: 879630 - DNA, 99 bp, Homo sapiens
ctgtgctggcgccgggtcccgcggggaaattactccacaggatccgctgaacataggatgttgccacaaaatctacctcgtgtatttttctctttcact

SEQ ID NO: 879631 - DNA, 98 bp, Homo sapiens
actctgtggtgcgtcgccagctctttcttgacgtgcttgatggaaccaaagcattagccgccctggccgagagcagcttccccctcctcaacagccct

SEQ ID NO: 879632 - DNA, 99 bp, Homo sapiens
tcccttcctccatatttactggacagagtgctgtgtggattctgaagagccagtctttgaggctgtcatcaactgggtgaagcatgccaagaaagagcg

SEQ ID NO: 879633 - DNA, 99 bp, Homo sapiens
cagactgaaaatatgttttcagaggcatagaatcttcaggaaaatactggagttcctgagatctcaagaggtaccaatcttgggaaaaagaagcaacac

SEQ ID NO: 879634 - DNA, 99 bp, Homo sapiens
ctttagaaaactgatcttaatacaggtatcagaatggcaaagcaacttaaccttccagaaaatacagatgattggacaaaagaggatgtaaatcagtgg

SEQ ID NO: 879635 - DNA, 99 bp, Homo sapiens
aagatttgtaaagaaaactcttagtttccgttactatggcaatgacggcagggactacaacaacctttcctatgagcaaccatacccgggaaagagtga

SEQ ID NO: 879636 - DNA, 99 bp, Homo sapiens
ttcatttcagtctgcaacaatgccacatgggcaattggagaaatctccattcaaatgggatgacgactcatttaatttacataacagcaatagtactca

SEQ ID NO: 879637 - DNA, 99 bp, Homo sapiens
acctggaatcatgggagaaaaccagacctccacttccaaggatatagagcagactcgagaacaggaagaactggaagaagctttagaagtggaacgaca

SEQ ID NO: 879638 - DNA, 98 bp, Homo sapiens
cccatacaccttccagccatgatgccgaagaggacgagccactgaaggagtcccgcaggaaggaggccttcttgttcacagctggagcaaagctgttg

SEQ ID NO: 879639 - DNA, 99 bp, Homo sapiens
ggacgttcagggaccctgatttgcatagatgtggttctgggattaatcagtcaggatcttgattactgccaaatctgtcgaaagggagataatgaagaa

SEQ ID NO: 879640 - DNA, 99 bp, Homo sapiens
ggctgctacggaggccattaccatgtatatattaaagatgttgatcatttgggaaactggcagtttcaacatcgagagtaaacatgaggttacgatcct

SEQ ID NO: 879641 - DNA, 99 bp, Homo sapiens
gattgaagagtatttgaagtctgtgtcaaacatccatatcataagtggaattttggagatattcaaagaacagaaactgttcatacttggtgcgctgtg

SEQ ID NO: 879642 - DNA, 99 bp, Homo sapiens
ggctcgggacggaggacgcgctagttactatactggcaattgctggagaagattttgcaattgttgcttctgatactcgattgagtgaagggttttcaa

SEQ ID NO: 879643 - DNA, 99 bp, Homo sapiens
cccggatgagtacgataccgaagcgggctgtgtgccccttctccacccagagcggggatctgatgagcttctttcttctggcatcattaacggaccttt

SEQ ID NO: 879644 - DNA, 99 bp, Homo sapiens
ggatggtcttgaaacacaaatggtttttgagaaccatggagtctggcagtaccgccgccagtgaggaggcacgcagccttcgagaatgtgagctctacg

SEQ ID NO: 879645 - DNA, 99 bp, Homo sapiens
gtccttaccagctttgacaatacaggaaatgtttagggagacgtggtgggcggtccttcctgtgacacgacccttgagtgacagttctatttgattgcc

SEQ ID NO: 879646 - DNA, 99 bp, Homo sapiens
ggcaaagatcccatacgtcaccttgagtacagggggcatcgagactttggctgccgtcttctctgaagctgagattgacagcattcaccagttagttgt

SEQ ID NO: 879647 - DNA, 75 bp, Homo sapiens
gtgcaagcttagagcgtctggccaagaatcagaggaagtgggacttaaccaccaccatgtcgagcaaaagaacaa

SEQ ID NO: 879648 - DNA, 99 bp, Homo sapiens
attcctctcccctattgctggctctgcagggctctgatcaagcggatccaagccatgattcccaaggtgtctttcctgaagactatcttcccgtctcaa

SEQ ID NO: 879649 - DNA, 99 bp, Homo sapiens
attgtcaaggcagaagggaaatttattaaaaaatgccaagacatggttatggccgagttttcggctttgtgagaaaccttaccatcaaacacgatggcc

SEQ ID NO: 879650 - DNA, 99 bp, Homo sapiens
atgatcggtcgtggagctccagagatgattactctcgggatgattataggcgtgatgatagagtacgcctgcctcacaccttgcgatgcgccaacatca

SEQ ID NO: 879651 - DNA, 99 bp, Homo sapiens
aacccccctgggcgcccttggagtaccgttcggttgaaacattgtagtcggtatatacatgacttatttccttcactcatcaagaatttggatcccgta

SEQ ID NO: 879652 - DNA, 98 bp, Homo sapiens
aacaggagcaggcgcctacatcctaactcgatttgctgtatgagatgcaagatgctggaattacttcagactcaatgatgaagaacttcttctttgtg

SEQ ID NO: 879653 - DNA, 121 bp, Homo sapiens
cagtgactaccatgacgaaaacatgtactacagccagtcttctatgtttcctaagggatgaggcatccaggacatctttttctgaccgatgtggaaacatagaagactggctgtagtacat

SEQ ID NO: 879654 - DNA, 99 bp, Homo sapiens
gagcatgctggaggaccacagctacctgcccgtgggcagtgtcagcttccagctttgaccgccattgaaggcacagcacatggggagccctgccacttc

SEQ ID NO: 879655 - DNA, 99 bp, Homo sapiens
tcttgaagtttgtggatgaaaattgggaaggttccctcaagtccaaggagtagccactctataaaagaaccagtatctacacttcaccgactctcccag

SEQ ID NO: 879656 - DNA, 99 bp, Homo sapiens
gactcccggggccatggccggaatgcagtaccctcagcagcagtcgcagatatggccagtacactatgaaccaggaaagcaccaccatcaaagttatgg

SEQ ID NO: 879657 - DNA, 99 bp, Homo sapiens
cacatcttctcatcttctcgtttgtctgcagaatactgggcacacagtgactcttctcgagcttctctgaaggatgaatttaaagttcttcctctccta

SEQ ID NO: 879658 - DNA, 99 bp, Homo sapiens
aggagacgactttcttctccaaggcaaggaggacttcttgttaatttccatccttcaattctgacctgtctacttccccagttgaccagccctagactt

SEQ ID NO: 879659 - DNA, 99 bp, Homo sapiens
ttagcgctcgcccagctagccgcagaaaacccgcctagtgccaagcaaccctccaagatgctagttatcaaaaaagtttccaaagaggatcctgctgct

SEQ ID NO: 879660 - DNA, 98 bp, Homo sapiens
atgaatcaaaccttggggacctcttactgggctttcttaaatattatgctacagaatttgagatggtgattgctcacaccaaagccttggacccctcc

SEQ ID NO: 879661 - DNA, 99 bp, Homo sapiens
tgaatacttgctatctgtttccagtccacatttcctccaactgctgctgcaaagcctcttggtaagactgaagtgactgtttggaaggtttcggtttat

SEQ ID NO: 879662 - DNA, 99 bp, Homo sapiens
cagcctcacatcaacttccagtgagagtgacacaggtcaggaagcagaatattccttatatggaagtattgatgaagatgttgtggtgatagaagcttc

SEQ ID NO: 879663 - DNA, 99 bp, Homo sapiens
tactgcggaagcctgtcaggttaaaatgtcatcctttagcaaattaccactatgccggacatgaggattctcaacctgataaaaatgagctttcctaat

SEQ ID NO: 879664 - DNA, 99 bp, Homo sapiens
agcaatgctaagaagacgtttggtttaaagaattaaaaggaagaacaacttaagagcttcttcaaagggggtcctgatgacaacttaattgaaggtgga

SEQ ID NO: 879665 - DNA, 99 bp, Homo sapiens
gacctctttaggaaagactttgtgcttcacgatccagaggctcggtggatcaatggacgatttcctgttcagtgtctccattttaagtgggattctttg

SEQ ID NO: 879666 - DNA, 99 bp, Homo sapiens
atagacatagagtggtcacttcatttaccaaccctggaaccgcagacctctgggcttcctgcaactagaagccatttgtgtcaaggtaacgtctggaga

SEQ ID NO: 879667 - DNA, 98 bp, Homo sapiens
tgctgtggaggctgaggaggcggcggcggagatctgggttgggtatctacagccattggttgctgttcaggtcagctttgctcctaacaacactggga

SEQ ID NO: 879668 - DNA, 99 bp, Homo sapiens
gaatgacgatgacgtctaccgcagcctggaggagctggccgagaagggaaaaggccgaggcatcagcgtgtgaagaccgcaaagacgatcccgagtaca

SEQ ID NO: 879669 - DNA, 99 bp, Homo sapiens
ttatgtgcttcaaacaggttgaaagcatcaaggcatgccatgggttgcctctcataaatggccaaagctgtgacccttatgcaacagtttctctagtgg

SEQ ID NO: 879670 - DNA, 99 bp, Homo sapiens
ctggctcaggaacagggacagcacctcatcccctggatgggggaccacaagatcctcatcgacaggtcgttcatgcccaacttggtgcctcccaagatc

SEQ ID NO: 879671 - DNA, 99 bp, Homo sapiens
tatattccagtgataaaaagagcattaaattcagttccagtaattattgctgctgttggtaccagacaaaatgacaaatggacacctaccagggaacgg

SEQ ID NO: 879672 - DNA, 99 bp, Homo sapiens
agacaatgaactcgatggttgcagtggagaagtcaatgtcagccaggatttctgttgccactgctgttgactctttctgtaaatgccattgtttccagt

SEQ ID NO: 879673 - DNA, 99 bp, Homo sapiens
cccaacggatgcttatggagtcataaattttcaagggggttctcattcctacagagctaaggtttcacgtgccacgatcatggtgccacggtactgcag

SEQ ID NO: 879674 - DNA, 99 bp, Homo sapiens
tccgagggttgggagagcgcgttggtggcgacggccgagtcagctcttggataagcacaagaatacagagagcatggtggagcttctggacttgtatca

SEQ ID NO: 879675 - DNA, 99 bp, Homo sapiens
gcccgcgccatgtccgcgcacaatcggggcaccgagctcggaagctgtagagaaatatgaagaagtgctacataatttggaatttgccaaggagcttca

SEQ ID NO: 879676 - DNA, 99 bp, Homo sapiens
cttgtctaatgtgtttcattctagaagagagttgaggtggggtcaaaatttgactgctgtccctcatgcaatctgtaatcccagctactcaggaggctg

SEQ ID NO: 879677 - DNA, 99 bp, Homo sapiens
gagacggtcgtagctgcggtcgcgccgagaaaggaattgaagccattttttatgaaggaagttggcagtcactttgatgattttgtgaccaatctcatt

SEQ ID NO: 879678 - DNA, 98 bp, Homo sapiens
cgagacggagccggacccgccgcctcccgggatgaccagtgtcccagtgaaggaacgagtgaaggtgtctcagaactggagactggggcgctgccgag

SEQ ID NO: 879679 - DNA, 99 bp, Homo sapiens
ctgcgggcgctgcgtgccgtgttccggagccagcagcagtaaggaagagcccaacactgctggaagtgagcatgccccatttcatgagaaccaacagct

SEQ ID NO: 879680 - DNA, 98 bp, Homo sapiens
ccgggtcggtcaccgctgaactctcagatcaatgtaaccactgtgcgggaatatctgccagaaggagacttttcaataatgacagagatgctcaaaaa

SEQ ID NO: 879681 - DNA, 99 bp, Homo sapiens
cgggcctcccattgcagcatctgtgacaactgtgtggattttcagctgaactctcatctctcaacactggcaaatattcataagatctaccacaccctt

SEQ ID NO: 879682 - DNA, 98 bp, Homo sapiens
cagctcaccactgaaacccacaagaaatcagagtttttcaaagctgtaagtgctacagttgaaactccagcagcgccggacccgggaagaactggtga

SEQ ID NO: 879683 - DNA, 98 bp, Homo sapiens
aagtcttccaggacgagacatcactggctacacatttccagcaggctgcagatacgagtggacaagccctcgggaccaaggatcacgtcatgactccg

SEQ ID NO: 879684 - DNA, 99 bp, Homo sapiens
cccttttcctgcacaacaacgagcagccagggattcatgcacatgaagctgtcccgaaccaaggaacacaaatatgtgctgggccagaacagcccgccc

SEQ ID NO: 879685 - DNA, 99 bp, Homo sapiens
aaaagtgatttacatccaacattaccagctggccgatactctttgaatgtcacatacattatgtgacggagctcacagaactaattaaggcaaagtcct

SEQ ID NO: 879686 - DNA, 99 bp, Homo sapiens
ctcattcgccacatcaccaaggaccccagtgacaggaccaggatgtccctcatctttgccaaccaggaggaagagcaagcaggccctgagggactataa

SEQ ID NO: 879687 - DNA, 137 bp, Homo sapiens
gagaacccaaggactcccctgggctcatccagcagcctctgcttcccaggagagaggtgctgaagtccacgaagagaatgtggtggtaaaatgcacttgagggaaggtgaatttgaaaaggcacacactgatttttt

SEQ ID NO: 879688 - DNA, 99 bp, Homo sapiens
ctgagtcaccagttaactatggtagcccacccagcattggtgacagtggatagtggaaacaggagatcgtggatcctccttcaaaaatggaggatggaa

SEQ ID NO: 879689 - DNA, 98 bp, Homo sapiens
gagggcaccctcagacggcaggcacaggaggacgggtcaccccatcaccggaatgtctacagtggcatgaacggattctcaaagttggattggtggaa

SEQ ID NO: 879690 - DNA, 99 bp, Homo sapiens
ctcctgagtagctggtattacagtccaagtcaaggtccttgttgtacagcacagtgtgcattcaagtcaaagtctgagaagtgtcgggatgattcagac

SEQ ID NO: 879691 - DNA, 101 bp, Homo sapiens
tcccagcactttgggaggccgagagtaagccatatcaaagacttcattgaaaaataccaaggatctcaaagaagtcctccgttttccctggcaacagctct

SEQ ID NO: 879692 - DNA, 98 bp, Homo sapiens
ggaaggaggcggcggccgcgatgagccttcagcctgccgggcaggggacgtgaacatggatgaccctaagaaggaagagatgggattttgccatgttg

SEQ ID NO: 879693 - DNA, 99 bp, Homo sapiens
gtaagtgaaacaagatatgctgaagagcagaatcagcatgaggagcagacaccccaggagaggctcccaccccgtggccaggtacctaggctccgtgga

SEQ ID NO: 879694 - DNA, 99 bp, Homo sapiens
tcaaagtgatgacctggatagtgaagacttcacagagaatgcagttgtcttgacttcaggtctgtctgttctgttggcaagtaaatgcagtactgttct

SEQ ID NO: 879695 - DNA, 98 bp, Homo sapiens
agggagagaaaaaggagagcctctgagctcaacggaggattgtgcctgagaagaacccacagaggatgctccaaagtgacctgcatcagcttgacccg

SEQ ID NO: 879696 - DNA, 99 bp, Homo sapiens
aggctttgggttttcctctccaaacaaaacagtgctgtccccggcataggtccatctctgcagaagccatttcaggagtacctggaggctcaacggcag

SEQ ID NO: 879697 - DNA, 98 bp, Homo sapiens
agaagtaggaatccctccagaacaatccttggaaactgctaaggcagtaaagaatggcctacctgatactcaagccaagttccatattatgtttttat

SEQ ID NO: 879698 - DNA, 99 bp, Homo sapiens
cttcgtggccgctgtggtgaatgggagcgcgcagggcgcacagatcgcatcagaagagctaacaattgctggaatgacctttacaacttttgatcttgg

SEQ ID NO: 879699 - DNA, 99 bp, Homo sapiens
gaatatataaatgaatgtgacagtgattatcatgaggaaagaacaattctccctatgtcgagctggtggagctgtctaaggctcaagatatagaagcag

SEQ ID NO: 879700 - DNA, 99 bp, Homo sapiens
agctttgaagcttgatgtctactgttttgaagcgttcgatcttttaacatcacatcacatgctgacagcacaagaagatcctcaagcccgccgacaaga

SEQ ID NO: 879701 - DNA, 98 bp, Homo sapiens
accacagaggatccagatattagcacagcagaccttggtgatgtgctacagatgagtaacccgaagcccctagaggagtggtcacctgcctgagggca

SEQ ID NO: 879702 - DNA, 99 bp, Homo sapiens
tgataattcagcatcttggcctgaggcccaccaataacaaatctgccacttggctgtaggtggtagattgtatcctcatcaaggtatttcgcaggcaca

SEQ ID NO: 879703 - DNA, 99 bp, Homo sapiens
aggaaatgactattcctccaaataaaatgtttggtgcacctcgatttggaggaagtagggcagggcccttatctggaaagaagtttggaaaccctgggg

SEQ ID NO: 879704 - DNA, 136 bp, Homo sapiens
gcttgaaggcccttttacacaccgacctgaacccgggacactaaaaattctaccttcatacatggtgccgccatgccgccattgccaagtacttcggggatgcgctgcctgcctgcgccaaaggctgcgaccactg

SEQ ID NO: 879705 - DNA, 98 bp, Homo sapiens
agcaattctcctgcctcaacctcgcaagtagctgggattacaggcatgcaccaccatgcccaggttacggcctccgctgccacagggccatcatcacc

SEQ ID NO: 879706 - DNA, 99 bp, Homo sapiens
gaatacaaaaagcataggcggaccatgataatttccccagagcgtcttgatccttttgcagatgattcctggtcgggtggcttccagtggtcttcagtc

SEQ ID NO: 879707 - DNA, 99 bp, Homo sapiens
gcaacagccccttcgtcccaagttctcccatgggcaggtggtctctctggatgagctgcgccccttccaggacccagacctgagctccctgcaggccgg

SEQ ID NO: 879708 - DNA, 102 bp, Homo sapiens
cgggatcgtgaccgagaccgtgaccgagagcgtgaccgagagcgcgcgatgacgatattcgcgctctcggtcacgctctcggtcacggtctcggtcacgatc

SEQ ID NO: 879709 - DNA, 98 bp, Homo sapiens
accatccaagcagccaggcagtatcgggagcaggaaagccagtgttgtggaccctagcacagagaaccctggaatggcgatttctggcgtgctgctgg

SEQ ID NO: 879710 - DNA, 99 bp, Homo sapiens
aaatttctaatagaaaacaaaatgcagctctatgttccacagcccgaggaagacatctatgagctgatacaaggcagatccaaccatccccaccgtggt

SEQ ID NO: 879711 - DNA, 99 bp, Homo sapiens
tccaaaaaaactccagctgtgaaagcaacataaatgaacatacaacctcctcttcagtgtcaaaaaagccacggttagaccagattcctgccgccaacc

SEQ ID NO: 879712 - DNA, 98 bp, Homo sapiens
cctgctcttcctggactcctgagcagagatgatagtatttctgctgcaagtacttctgatgttcaagatcgcctgtcagctcttgagtcacgagttca

SEQ ID NO: 879713 - DNA, 99 bp, Homo sapiens
ctcgtgcctccctgaaccactccactgcctttaaccctcagcctcagagtcagatgcaggggaggtggggaagacagggctccagctaccacaggacgg

SEQ ID NO: 879714 - DNA, 99 bp, Homo sapiens
tgtgtatgaccttacaagtatccccgttcgccaccaattatgggagggctggccaacttctgctacagacgactcagtgatgcaggttctgaatgctga

SEQ ID NO: 879715 - DNA, 100 bp, Homo sapiens
caagaagaaaacagacgggtaccaccgatatgatcaaggaaaattctgcccatttttatggctgaagttctaaaaacctcccattctctggctgctgctt

SEQ ID NO: 879716 - DNA, 98 bp, Homo sapiens
tcagatgttcattcatctggatcttcagatgcacatgaatagcgggttttgcagcaattgttgcatatggattatataaactgaagagcaggggaaat

SEQ ID NO: 879717 - DNA, 99 bp, Homo sapiens
gacagaggtgcctggggcaacctccaccttgacggttccaggttagttgcaaagtgtcccagttcattcatctttacctgatgggctgtaattactttt

SEQ ID NO: 879718 - DNA, 99 bp, Homo sapiens
gagatgtgatgttggagaactacagaaacctggtctccctagccacagatgaagatatccttgctaaaggaaaacagtccatcaggagtcaggctttag

SEQ ID NO: 879719 - DNA, 135 bp, Homo sapiens
agccagtttcaccctctggagtggttggcaagggaagcctgcaaccaggacgctctccaggaggcgggcacattcagctatgtttccagtgtcctctgggtgtttccaagagcaacaagaaacgaataaatctct

SEQ ID NO: 879720 - DNA, 99 bp, Homo sapiens
tttaatgactttggtgccctcaacatctctcagagacgaaaggttttaaatgcacagagagcaggatacaaggcagccatagttcacaatgttgattct

SEQ ID NO: 879721 - DNA, 99 bp, Homo sapiens
tttttatctcatattagtgcctgtgatggcatctttcatctaacacgcctactgaacttgacgcactggtatttggccatctatacaccattcttacca

SEQ ID NO: 879722 - DNA, 99 bp, Homo sapiens
ctgcggactagcgaacccggaggtatcagtgcttcaaatcggcctggatgtttgaggtgtttcataggggcttttcgtttcctgtcaactataaaagct

SEQ ID NO: 879723 - DNA, 99 bp, Homo sapiens
tacaaactggaaaataaagattacagagaaaaaaccaacaccttcctgtgcagtcctgttggaatttgttgaaatgttccttcttgcctatgctgtgcg

SEQ ID NO: 879724 - DNA, 99 bp, Homo sapiens
gttcaagaccagcctgggcaatatgcacttcataaagcctgtaaaatttttagtaaaattcgaagtggtaagatttatgtgaatgatcttccagtgatc

SEQ ID NO: 879725 - DNA, 99 bp, Homo sapiens
atggaatctggtccaaacaatcatgggaatttccaaggggattcaaacttcaacagaatgtggcaaccaggaaatgggtcctgatgaatatgaagagat

SEQ ID NO: 879726 - DNA, 99 bp, Homo sapiens
tgaagagagatgggcgatatatatattacttgggtgataaaagaaaatgtggctgaagttacccgaagttcagcttgcagtgtaattcagaagagttaa

SEQ ID NO: 879727 - DNA, 111 bp, Homo sapiens
gacaagggcgactccaaggaaacgcggctgaccctgatggaggaagtgctcctgctgggcctcaaggaccgcgagaaatgcactcggtgatggaaagagagccactattct

SEQ ID NO: 879728 - DNA, 99 bp, Homo sapiens
cgaccatcacatcgtccaccgggacctcaagaccgagaacctcctgctggatggcaacatggacatcaagctggcaggtgcagaggccaagaccgtttt

SEQ ID NO: 879729 - DNA, 98 bp, Homo sapiens
agccgggtgtgagctgcctgaaaatgcactcggatgccgccgctgtcagaaaatgtttataggaggccttagctgggacactacaaagaaagatctga

SEQ ID NO: 879730 - DNA, 99 bp, Homo sapiens
agaggagggggctcctgacctgtcgggaatgggaaactttgtgaccaacacacatctcggaccaggagctgcattatctattctagacaaatttcttga

SEQ ID NO: 879731 - DNA, 99 bp, Homo sapiens
aaatctggaggcagtatcacctaacgggcaagttaaagtcttcagagccctgtatacgtttgaacccagaactgtaagtgttcagtttttaacttctaa

SEQ ID NO: 879732 - DNA, 99 bp, Homo sapiens
accgtcttctgcgtcgctcgcgctgggagctgtagaccggagctgttcctattcggccatcttggctcctccacaaagcacaatcattgtggagaagac

SEQ ID NO: 879733 - DNA, 98 bp, Homo sapiens
tttgaagatacatgagacagcagccaaacccccaggtctccaattgagaaacatggcactgtttttcctgcactctacccacctattgctggacttct

SEQ ID NO: 879734 - DNA, 99 bp, Homo sapiens
tgagacggtgtcccgccgaaagttctgaatgcagtgatggggaatggtctgcttctttgcctcatcgattttctggtacagaaaaagatcaatcctcaa

SEQ ID NO: 879735 - DNA, 98 bp, Homo sapiens
aagaaggaccagctcatcaccaagtgcaatggagtccatgaagaatatcagctgccatattacgacttagtgccctctgacccttccattgaggaaat

SEQ ID NO: 879736 - DNA, 99 bp, Homo sapiens
ctggtggactttcttcttctcagagttcatattctccaagcaatagggaagccatggatcctatagctgagttttactacccttggatgctgctgttga

SEQ ID NO: 879737 - DNA, 98 bp, Homo sapiens
acccaagcccagggctgtgaacgtggctttcctcggttatgaagacagtatggagtttccagaccatagtagacatttgctacagtgtctgagcgagc

SEQ ID NO: 879738 - DNA, 98 bp, Homo sapiens
ggcgctcctagaccttccagcagtactttggtggacgagttggagtcatctttcgaggcactgaaggatagcacagaagtagaaattgtggatgagaa

SEQ ID NO: 879739 - DNA, 98 bp, Homo sapiens
ggatcgtgaccgagaccgtgaccgagagcgtgaccgagagcgcgaatatcgtcatcgttagaaggcactaactcagcgacttggtagaattatcagtg

SEQ ID NO: 879740 - DNA, 99 bp, Homo sapiens
ggccaaccagctgctcagcaccactctcccgccgcccaaccctccaggcactgcgtggacctgccagacacaggactctgcaaggagagcatcccgcgc

SEQ ID NO: 879741 - DNA, 99 bp, Homo sapiens
tcacagagaagatgaaacacagtgaactgggtgttgatgatgccttctatacattagttcgagaaattcgaaaacataaagaaaagatgagcaaagatg

SEQ ID NO: 879742 - DNA, 98 bp, Homo sapiens
caccaccgccgctgccccggctgcctcctccctgaggccttcctgatgcgcttgcctgctccctggtctctctgcatggggaaggagtgttcccagct

SEQ ID NO: 879743 - DNA, 99 bp, Homo sapiens
catcaacaaaaatggtcttcaagcctcaagctgtgaagttcctttacactgggcttcccagcagcggcttatggaccagtggcagcagcggcggtggcg

SEQ ID NO: 879744 - DNA, 99 bp, Homo sapiens
gtcattctggatgtgggaaccgaaaatgagctccagcggcgccatgagcaaatgaaaaagaatttggaagcacagcacaaagaattggaggaaaaacgt

SEQ ID NO: 879745 - DNA, 99 bp, Homo sapiens
gtacccgccaagctgtcatcacaaaagagttgattgaaattatctctggtgctgcagctctggatatggagaaggtggagcggcaggctgtcccccagg

SEQ ID NO: 879746 - DNA, 98 bp, Homo sapiens
cgggcggaggccggcccccgagagccgccgacatgaagaaagacgtgcggatcctgctggtgggagaacctatggcattgctggttctaccaacgtga

SEQ ID NO: 879747 - DNA, 99 bp, Homo sapiens
ctcccatatccagtatccctactgtccttctccgtcctgctgccaattcctgggtagcctcagcatctgattttcagagcgctgaggttgaactcgtac

SEQ ID NO: 879748 - DNA, 99 bp, Homo sapiens
attacagttgttggggttggtgctgttggcatggcctgtgccatcagtatcttaatgaaggagcaatttacagcaatgagggatttatacatgaaaaat

SEQ ID NO: 879749 - DNA, 106 bp, Homo sapiens
gggaactcctgcttctccttgcctcgaaatggaccccaactgctcctgctcgcctggctgctgctcctgctgccctgtgggctgtgccaagtgtgcccagggctgc

SEQ ID NO: 879750 - DNA, 99 bp, Homo sapiens
cttaaatgaaacatttttgtcctgaagtttttcacaactgcctgagctgagctttaagttcagtaaacctgggccgcctgctggggtcataggcccagc

SEQ ID NO: 879751 - DNA, 123 bp, Homo sapiens
cgtcttttgcctctttctctcaggctttcctacaactcatgcccagcagcagcaagcagatgccatggacaatattaccaggcagaaccaattctacgatacccaagtcatcaaacaagaaaa

SEQ ID NO: 879752 - DNA, 99 bp, Homo sapiens
atgttttccaatccaggatatccttctttttggccttgcccccggatttgttcactgggtctttgtctttcttggccgactttccagcgtccttcttct

SEQ ID NO: 879753 - DNA, 99 bp, Homo sapiens
gctgtttgtattttggctgctgcaggagccattttagcttattcagctgattctgaatcatcttacactaccagacctgtgtagattagcacagacttg

SEQ ID NO: 879754 - DNA, 99 bp, Homo sapiens
cagagaatatgatacagatgtattcaaatggatcttcaaagaattgacttctctttgaaagataacgaaaagcagatcatcctggaccttgctgtctat

SEQ ID NO: 879755 - DNA, 99 bp, Homo sapiens
gctctctcttcagaacagagccaatggcttggaatgagtacaagattctgctgtactcattggatggccggttgttgtccacgtacagcgcttacgagt

SEQ ID NO: 879756 - DNA, 99 bp, Homo sapiens
ttctttagaactgaagccattctcaaagcctcctggccccagagacagggtgatacaattctggagactggagaagtaattccaccaatgaaagaattt

SEQ ID NO: 879757 - DNA, 99 bp, Homo sapiens
taatcctcacggctcagctgcctctctggtctccaactagtattatgagaggagtcaatcagagattgtccgtgtggagcccttggtgaccatgggcca

SEQ ID NO: 879758 - DNA, 99 bp, Homo sapiens
ccacgacctggacaggacggagcgcaggcagctccagcagtacccgcggctacgggaggagatggagcgcatcgtgaccacccacatccgggagcgcga

SEQ ID NO: 879759 - DNA, 99 bp, Homo sapiens
cgctacgggaagcaggcctcgccacaggctgtatagatcaattggagaatacgacgtcctccgtgggatttttaccagtgagataggaacaaagcaaat

SEQ ID NO: 879760 - DNA, 99 bp, Homo sapiens
ctagtcatctcggaaggcctcagaaaaagccttaaaggcttgatagttctgaaatggatcacagtgaaaatgaagattacacaatgtcttcacctttgc

SEQ ID NO: 879761 - DNA, 99 bp, Homo sapiens
aggaaatgcagaagaatcaacgttattttgttttgcagttcggggccaagctggagggaagaaggccaatgatgaggccaatcagagtgatacaagtgt

SEQ ID NO: 879762 - DNA, 99 bp, Homo sapiens
gcctttgcatctgcaatgggcttgaacagctggcaggctgcagctgcagcctgccgctcagcatcgatcttcttgctgccatagccttctacctccacg

SEQ ID NO: 879763 - DNA, 98 bp, Homo sapiens
tttcagcctgccagcttctcctacggattctggacttgccagccccacaatcatctgacatagcccagagatacaggataagcaaatacccaaccctc

SEQ ID NO: 879764 - DNA, 153 bp, Homo sapiens
tgagcaaacacaaagtcgggctcatccaaggatgagattttgccagagaaaggacgagcagcaagtcagggagcttaagttgctccttcacatgttcccactctctgtgcggccaccatggaagtcggacctgcccttctgccatgattgtaa

SEQ ID NO: 879765 - DNA, 98 bp, Homo sapiens
gacaacgcagatatagaacatttcttttatcacactggcaaaactcaaggctcagaaactgcagggcccccaaaaaagaaaaggaagaaaacacaaaa

SEQ ID NO: 879766 - DNA, 99 bp, Homo sapiens
cctagcctatcagctggggctggatgagtaacattatacatccatgggcataccaagttggatttcacagtctggcatactgcaattgaaaaagcagca

SEQ ID NO: 879767 - DNA, 99 bp, Homo sapiens
agaaaggaagaccatcaatcagggtcaagaagatgaaatggaactccttgcctttgccgattggaagcattaacaatttcatcctttctacgtgactgt

SEQ ID NO: 879768 - DNA, 99 bp, Homo sapiens
tccaggccaaaggcaggacgctgatcccttgctatgaagacctcctgacagtgagtgagactgccaatgagccccctcaagatgaaggtaattccttca

SEQ ID NO: 879769 - DNA, 98 bp, Homo sapiens
accctgacttcttgaagaaagacagatcctgtgtcacccggcaactcagaaacatcaggtccaaggttaatgttgaagaaggaaaatgcggaagtcgt

SEQ ID NO: 879770 - DNA, 99 bp, Homo sapiens
gtcactgtgacagaggagaggctccagttcccgaatccgaagtacttcaaaagctgactggacgaggtccacgtctctgcttttccagatcacctggtt

SEQ ID NO: 879771 - DNA, 98 bp, Homo sapiens
atcctgcctgcaccattcaagctactccttcctgtagagcagaaattgtattttgcacgaacatgcagttattgaagattaggatcaaggatagacaa

SEQ ID NO: 879772 - DNA, 99 bp, Homo sapiens
gagctaagagatatctgcaatgatgtactggtacctgcacatgttgttctttgtcagtgctgtcaagtgtgtgccagggtgatccatggtcactttccg

SEQ ID NO: 879773 - DNA, 99 bp, Homo sapiens
gctgcaagattgccacttgatgccgccaaacggatttgtcttggctgttactatgacacgggaagcaattgatgaatttcggcgttttcagcgtgacaa

SEQ ID NO: 879774 - DNA, 99 bp, Homo sapiens
gctgcgggcggagacatggccaacatcgcggtgcagcgaatcaagcgggagttcaaggaggtgctgaagagcgaggagagacagggtttcaccgtgtta

SEQ ID NO: 879775 - DNA, 98 bp, Homo sapiens
ccacaccgagaaccgccgcggagccctcatccctaacggtgaaaggatgaattagtgtccaagtccaaaaaacgctactatgtgaattctctacagca

SEQ ID NO: 879776 - DNA, 99 bp, Homo sapiens
atatccaagaagcagtagagggtgccatgcacattcaggccatcgaagacggcaatttggaggaaatggaagaggaagtacggcttaagaagcgaaaaa

SEQ ID NO: 879777 - DNA, 99 bp, Homo sapiens
ctttgcaatgattcctgcaaaggaggcaaaggatatgctatataagatgctctcagaaaatttcatgtcactccagtctgcctaccctcctaggctgag

SEQ ID NO: 879778 - DNA, 99 bp, Homo sapiens
ccaacctctacccttgaaagcagagatagtggcatcattggactcagcccaggagagtgttattactcgagatattcatcgtacatttcccgcacatga

SEQ ID NO: 879779 - DNA, 99 bp, Homo sapiens
ctcccaagtagctgggattacagactgacaggccaactgttatagaatacgatgatcacgagtatatctttgaaggattttctatgtttgcacatgccc

SEQ ID NO: 879780 - DNA, 99 bp, Homo sapiens
gttctgtccttgtgcattcgtctgtggaaacctacacccctccagcccatgatgatgccatttggtcagttgcttgggggacaaacaagaaggaaaact

SEQ ID NO: 879781 - DNA, 99 bp, Homo sapiens
taaagagaaacctcaagatgtggatttaccttatcccctcaacaacttttcagtggcaaatatccagaaccctgaccctgccgtgtaccagctgagaga

SEQ ID NO: 879782 - DNA, 99 bp, Homo sapiens
caatgttgtctgcagccagcctgctcgaaactttagtcggcctgatggcttagaggactctgaggatagcaaaaatggaatgactcctctaatgcatgc

SEQ ID NO: 879783 - DNA, 99 bp, Homo sapiens
gaagcagcacgaaagagagaggtccgtctaatgaagaacaggctaattcacctaaataagattgatcctcatgctccaaatgaaatgctctatgggcga

SEQ ID NO: 879784 - DNA, 99 bp, Homo sapiens
tagttcaggctgttgaaaagattctccttattgtatacctccttgttgcagtaactatacttaggaagatttcatttatcaaagcttcaatcactgcgg

SEQ ID NO: 879785 - DNA, 98 bp, Homo sapiens
ggagagggcaataagagcctggtggtggcccacgcgcaggttgcacagagcattgaggatcaccatcaggaagtgattggtttctgcagagagaatgg

SEQ ID NO: 879786 - DNA, 98 bp, Homo sapiens
agtcatgggccagacctcggtgtccacgctgtccccgcagcccggcagcgtgatccgtatgtgaaactttcattgtacgtagcggatgagaatagaga

SEQ ID NO: 879787 - DNA, 99 bp, Homo sapiens
gcctgggcaacagagggagacccttcagtaacagagttttcacatcccacaaggttgagaaggatatcatcatctttatcatctacttcacatcccagt

SEQ ID NO: 879788 - DNA, 150 bp, Homo sapiens
gccgactggaccgagctcaccagctgtgtgccctccgtggtggacggcaagcgcgacgccaggctgagaccgtccagcctgcagcagaatcacctggcgaggaggtgcctgttgaaaaagataagaagtttcattcagaaaagatgaccc

SEQ ID NO: 879789 - DNA, 99 bp, Homo sapiens
gacacactggtctggtgcatgtagccatagccttgggaatggctttgctgataggctccgggaagaacaggtgctggcttagaaacttcaatcatactg

SEQ ID NO: 879790 - DNA, 99 bp, Homo sapiens
gtttcggtcatctaaaggaggttttaaacagtataacagagaatgtaactggtcactacatttccccctttcatgatattcctctgaaggtgaactcta

SEQ ID NO: 879791 - DNA, 99 bp, Homo sapiens
cggagcaggttgcccttctgggtgaatgaggccccgcactgattgcactggaagggccgttctccggtcagggtgagtgtcaagtttgcgcacttcgag

SEQ ID NO: 879792 - DNA, 98 bp, Homo sapiens
ggctgtaatggcctttcttatactctagaatatacaaagacaaaaggagattctgatgaagaagttattcaagatggactccctggaggaaaagcgga

SEQ ID NO: 879793 - DNA, 99 bp, Homo sapiens
attgtctctggatctcgagataaaaccatcaagctatggaataccctgggtgtgtgcaaatacactgtccaggatggcgcagaagtaccatgagtactc

SEQ ID NO: 879794 - DNA, 99 bp, Homo sapiens
aacttttgatgatcatgatacagttgataaaattgttgaatggtgtgctcttgcttgcacagcttttgaatgaggacccagtacttcaacttaaatgca

SEQ ID NO: 879795 - DNA, 99 bp, Homo sapiens
gccgtgaatgtggaggacgccgtacttcatgtgccctcttgcccattcaaggacctcatactcagaaatttcaggcaagttactttcatctgatttctc

SEQ ID NO: 879796 - DNA, 99 bp, Homo sapiens
ctgggtgacagagcgagactctgcttctggagaggcctcagggagctcttagtcatggcagaaagtgaggcaggaccaggcccgtcacgatgagaccag

SEQ ID NO: 879797 - DNA, 99 bp, Homo sapiens
gcgtcaccatgggggctgtgctgggtgtcttctccctcgccagctgggtatatgactgatgggatgttacttcgtgaagctatgaatgatcccctcctg

SEQ ID NO: 879798 - DNA, 99 bp, Homo sapiens
ttgattgatatatatgctgacgaggagttcaaccagagacggaacctcactatgttgcccaggctggtctcgaactccttgtctcaagggatcctccca

SEQ ID NO: 879799 - DNA, 99 bp, Homo sapiens
tcagcctcaacctcaccttctgtgtctgcgtgtccatcgctgctgtcctgcccaaggtccaggacctaaaaaacatgggtgctaaaaatgtgtgcttga

SEQ ID NO: 879800 - DNA, 99 bp, Homo sapiens
gtcaagatggataaaaagtcctttgaaatggtgctggatgaaattagaaagacttaattcagtgcacaaatgagatgaatgtgaacatcccacagttgg

SEQ ID NO: 879801 - DNA, 99 bp, Homo sapiens
atctttcaaagagtccagaggaaaagaaaacagcaacacagttacatagtaaaaggaggcctaaatatcattgaaatggattccaagcgtgtgcctcga

SEQ ID NO: 879802 - DNA, 98 bp, Homo sapiens
tgaggatccctgcaccctccattatcactctgtgatagacccttcaactgaaggcctggaaggcaagagcccagaaattcccaattgagaattgtgtt

SEQ ID NO: 879803 - DNA, 98 bp, Homo sapiens
attaactcattcaaggttacccagttgccatgaatcatcttaatggacagaaaatgtatggaaaaattattcgtgttactctgtctaaacatcagact

SEQ ID NO: 879804 - DNA, 99 bp, Homo sapiens
aaagcataattgaatttgtttcacccccgtggattccagtgggcccgacagcgcaacaggaattgaatgatctggcacgggaccctccagcacagtgtt

SEQ ID NO: 879805 - DNA, 99 bp, Homo sapiens
aagaagaagaggaagtagccaaagagcaactaactgatgctgacaccaaagaaaatggtgtgaatggaacattaacttcaaatgtagcagactctcccc

SEQ ID NO: 879806 - DNA, 99 bp, Homo sapiens
ggaacaaactagccctcaagacgggaatagtagccaagaagcagaagacggaggatgaggtacctgaaagaattccgcacagagcagtgcccactcttt

SEQ ID NO: 879807 - DNA, 98 bp, Homo sapiens
ctaacgctgcctttgctttaaaacagtattacttgcgggtgttgatgatgccttctatacattagttcgagaaattcgaaaacataaagaaaagatga

SEQ ID NO: 879808 - DNA, 99 bp, Homo sapiens
caacaagcacttcctcatcgtctttgtccacgcgctggagcagcagaaggactttgcggtgcgcgacaggacccctaccatggaggagaccatcaaaga

SEQ ID NO: 879809 - DNA, 98 bp, Homo sapiens
agagctttctggaagaaaggaaatgttaggatcactttattctggtttttgtcatccattggagggacactgtatgaggttggaaagcctgaaatgca

SEQ ID NO: 879810 - DNA, 99 bp, Homo sapiens
cccaagtacctgggactacaggtggtggtaatcattagttccagggtgctctgccatgttgacgcaagctgctgtaaggcttgttagggggtccctgcg

SEQ ID NO: 879811 - DNA, 99 bp, Homo sapiens
ctctggtgttgggatgatttgaagtcatgatgaccagctgctccaagagaacaatggacataatcggcctggtgggtaccttgcttggtcactcagcac

SEQ ID NO: 879812 - DNA, 99 bp, Homo sapiens
tcgccggagctctgatcgccgggaacccttgccgctgctgtcctgcgaccccaagcagatatgaagatcaatgatgcagactgatggttttgatgaagc

SEQ ID NO: 879813 - DNA, 98 bp, Homo sapiens
aatacaaatcacacgcataatggatgaaaggaaccgacaggtaaaataccatgaagattttgaaaaaacaaaggggagaggctttactcccgtcgtgg

SEQ ID NO: 879814 - DNA, 99 bp, Homo sapiens
gtcccttcacccgggctccgctcttgccttctccacacttgtttggctccataaaaatacagactcaccagttcctgctttgatgtgacatgtgactcc

SEQ ID NO: 879815 - DNA, 99 bp, Homo sapiens
gaggaaatgaactacatcactgcaataattgaggagcagcccaaaaactatcaagtttggtggtataagttgaaatccaaaccaggaaagaaggacaag

SEQ ID NO: 879816 - DNA, 99 bp, Homo sapiens
ttaactgccgaaggaaaatgtcactgtcccattggccatattttaggttttacacatccataagtagacctttttggagcctcaccagccaattcaatg

SEQ ID NO: 879817 - DNA, 98 bp, Homo sapiens
gtcttggctccctcagaagcatcgtgaaaagcctccttctggttccaaatgaaaatggtgtgaatggaacattaacttcaaatgtagcagactctccc

SEQ ID NO: 879818 - DNA, 99 bp, Homo sapiens
gaacctggatgaatgtagagagaaagtacttcaaggctcacaggcagaaggaattttccttgtcttggatgagacttttgacttggacttttgggttaa

SEQ ID NO: 879819 - DNA, 99 bp, Homo sapiens
tggaagcacactgcagaatctgcgggcccgcgtgctgagtggaaagttccgcatcccattttttatgtccacagggctccttggtaatgaccagtctaa

SEQ ID NO: 879820 - DNA, 116 bp, Homo sapiens
cccagctcgcgcttcagcgtcccggcgccgtcgcgccactcctccgagtgtcaggcccttgaaaggaaaaattctgcaattccatcagagttgaatgaaaagcaagagcttgttta

SEQ ID NO: 879821 - DNA, 98 bp, Homo sapiens
aaactcgaagaacagctgtggaaagaagttgcaaaacactggtcttgaatccagataatagttttgaaatactggttgaccaatctgtggtgaatagt

SEQ ID NO: 879822 - DNA, 99 bp, Homo sapiens
tgtggatgctcgcaacaaagaattaattgcaagctgttgcaagaggattttttaactatattgaaaaactgaagtatgaacaccacctgaaagaatcat

SEQ ID NO: 879823 - DNA, 99 bp, Homo sapiens
gccacgttcattaaagattatttctacatctaggattttgccaaactgttgtgcagactctgcatgttccagcatctcttcaaattcctgatactcttc

SEQ ID NO: 879824 - DNA, 99 bp, Homo sapiens
ctcagatgatagtaaagatcaaaagaattcgaagggagttggtaaacgctggtactgaacgacacctgggtctccttcccttcctggtctgaggactcc

SEQ ID NO: 879825 - DNA, 99 bp, Homo sapiens
gagtgaggaaaaacgagccaaacttcgtgaaattgaggtaagactgtgccaaaatcccaaacttcagttgaaaaatagcccaccatatatacttgatat

SEQ ID NO: 879826 - DNA, 99 bp, Homo sapiens
ctagtacaaacaggctgctggcattgagataagccaatggacacgtcagtgttatctgaagaaggaggagagccttttcagaagaaacttcaaagtggt

SEQ ID NO: 879827 - DNA, 99 bp, Homo sapiens
cagctggacagcacaattggaatccaccctgtctgtgcagagattgtgattgctagcattatgtgcagttacaataaaaatgactggacggaacttgcc

SEQ ID NO: 879828 - DNA, 99 bp, Homo sapiens
ccttgcccgagaacatccagtttgatgtttactacaaggctcttgcagccaatgccggaacaggatttgctgttgctgagcctcaaatcgcaatgtttt

SEQ ID NO: 879829 - DNA, 99 bp, Homo sapiens
ggaccacagcattcctgaaatacatccaggaaagacatggagattctcttaaaaagatttcagaagaaagtggtagcttcctttccaagaacagttctg

SEQ ID NO: 879830 - DNA, 99 bp, Homo sapiens
cgagagcgtgaccgagagcgcgaatatcgtcatcgttagaaggtgggatggatagcagggtctcaggcacaaccagtaatggagagacaaaaccagtgt

SEQ ID NO: 879831 - DNA, 99 bp, Homo sapiens
tatggagccagctgtgtcagtagtggacggccagacagagtccccggagggaagatgagaatgtgcctactgctcctgatcctccaagtcaacatttac

SEQ ID NO: 879832 - DNA, 99 bp, Homo sapiens
gtcagtttggggcatctccgcggtccggcccggggccccgggatctcggctgtccttcctcccggggagttgctgagtcagcccagaccggaaggagtg

SEQ ID NO: 879833 - DNA, 98 bp, Homo sapiens
tggaaggtgcgtgtggggctgggtctcggagtgggagacgtggagtgcaggtgtggatgaggtcaccattgtcaacattttgaccaaccgcagcaatg

SEQ ID NO: 879834 - DNA, 103 bp, Homo sapiens
caccaacatacagagcagttggtacaggcaattcttcagttagatagtcctgaatctgctcagtcaatgtatagctttctgaaacaaaatccacaaaatattg

SEQ ID NO: 879835 - DNA, 99 bp, Homo sapiens
gccagtttgatgttgagttccggcttgccgcggcctgccgcaatggaaacatctatattctgagaagtattgtccttgtgaacttccttgaagatggca

SEQ ID NO: 879836 - DNA, 99 bp, Homo sapiens
gcccactgtgacgatgtcaccgatctggacgtcccttcttggggtccatgttgaacttcttcctgcccattgccatcttccggttccgttgcaaggtct

SEQ ID NO: 879837 - DNA, 100 bp, Homo sapiens
tcaaaaattaccattttatgatttactggatgaactgccttgtatctagactggtgggttttatcagttcatccagtaaatcataaaatggtaatttttg

SEQ ID NO: 879838 - DNA, 99 bp, Homo sapiens
ggaggctgaggcgggcggatcacaagatgtctttggtggacttgggaaagaggttgctagaagcagcaagaaaaggccaagatgatgaagtgagaacgt

SEQ ID NO: 879839 - DNA, 100 bp, Homo sapiens
ggtgatttctgcatttccaactgaggctgtgattctaggattgaaaaagaggaaatgattccaaagcaggacatttctgaagaattggaatcccagagag

SEQ ID NO: 879840 - DNA, 99 bp, Homo sapiens
ttccagtggcagcagtacagcattactttatagcaaacgactgatgctattaactgagtacttggatatgaaaaatactcgtacggcctctgaaccatc

SEQ ID NO: 879841 - DNA, 99 bp, Homo sapiens
aatctatgcaaatatgaggatggttcatatacttacatcagttgttgcaatgaatttccaagggaagttaaagtatcttcatggacagaaaaagaaagg

SEQ ID NO: 879842 - DNA, 98 bp, Homo sapiens
gcgccggggcctagcgctatgcctgcggcggagactgcatcaggctctcgcctgacatttaccccggtaactgctgggcatttaaaggctcccagggg

SEQ ID NO: 879843 - DNA, 98 bp, Homo sapiens
gcccagctgcctgcccccggaggtgcccacgcagctgcctggacaaaattatatccagatcgagagacagaagattctgaaagggttcaatgaaatga

SEQ ID NO: 879844 - DNA, 98 bp, Homo sapiens
gagccccgaggatgaggctgctcgcctggctgattttcctggctaactggggaggtgccagggctgaaccagttgtcggacaagtaaccgcaagagct

SEQ ID NO: 879845 - DNA, 99 bp, Homo sapiens
cgcagaaggggtgaaagagactcggtgacagatacagatgttttcacctcctgtgagcagtgggaaaaatggaccaacttctttggcaagtggacattt

SEQ ID NO: 879846 - DNA, 99 bp, Homo sapiens
gaccctggagtacaccccgcagcacagccgcgacttcaaggttgctaggaagaggctcaatgtttgtgttttcaccagatcagtttcagagactgctta

SEQ ID NO: 879847 - DNA, 98 bp, Homo sapiens
atgcacgtgatactcacacagtggcttctgctcaccaacagatgaagacagatgcaccaacgagcaaaatgatgcttcaacacccaggccaggtctct

SEQ ID NO: 879848 - DNA, 99 bp, Homo sapiens
atcgtcccaaagcactaacagttggaggattcattgaggaagaaaaagaagacttgcttcagcatttctcagtttgatatacgtttgatgaaagaaggt

SEQ ID NO: 879849 - DNA, 98 bp, Homo sapiens
ggagatggcagcgtccagcaactccagcctgtccggctcgtcggtgtcctccgctcttccattcctatcctcctgcagtgtcgggcatcccccctatg

SEQ ID NO: 879850 - DNA, 99 bp, Homo sapiens
cttcttccatctcttcatattcatcaggacccatttccgccatttttgcccacagttcggaagcatctccagaaggcccgtaaaaatgataccctattg

SEQ ID NO: 879851 - DNA, 99 bp, Homo sapiens
gccgctggggccctttttagagcagattcacaatcgctatgaaggcaaggatgtttcaaagcacaaacggaatttggccatagcaggtggtgtaacgtt

SEQ ID NO: 879852 - DNA, 99 bp, Homo sapiens
tggtgccaatcattgacaatattatggtttgaagtgttgacattccttttgttgtgttacaatgctgccttaacttacatgcccagtgtttctcttcag

SEQ ID NO: 879853 - DNA, 99 bp, Homo sapiens
tggggacgaatcctgagcttgccagagacgggcggcgcaagctctttgtgctatggaagtgcttcctcttgcactaccttctccacctcgtcaattatc

SEQ ID NO: 879854 - DNA, 100 bp, Homo sapiens
agagactgctgaaaagctggcccgtgacctgaaggctgtcaagtatgtggagtgttctgcacttacacaggatgacagtgatgggattccgtggtcagaa

SEQ ID NO: 879855 - DNA, 99 bp, Homo sapiens
agtaactcctcttcatccactggggaggaagactggcacagcctccaggttggcgggctcatctgcgctggggttctgtgcgccatgggcatcatcatc

SEQ ID NO: 879856 - DNA, 99 bp, Homo sapiens
tggatgggagcctggcctttgaggtatataagaatgtgattctacaagttccagtgggactgactgtacatacctctctagtatgttctgtgactctgc

SEQ ID NO: 879857 - DNA, 99 bp, Homo sapiens
gcagggagaggagctgtggataacgggaggtgaatttccatgtcaacatagtcctggtgaaaggtgtagcagtcactcggcctacacccacagcatcga

SEQ ID NO: 879858 - DNA, 98 bp, Homo sapiens
tgaatttaaaggagcagccctggtgtcacctatcagtaaaagaccaagatcactccatggatgaaatgacagctgtggtgaaaattgaaaaaggagtt

SEQ ID NO: 879859 - DNA, 99 bp, Homo sapiens
tctcagactttctgtaaaggaaaacaagttttgcaggctttggaggtactcccagtagcaccaccacctgagccaagatcactgacagcagaagaagtg

SEQ ID NO: 879860 - DNA, 98 bp, Homo sapiens
atccgctggccttttagtttgccgcctcaggttttggaatcattttcaaataaaactccccctcacaccacccaactggaagtcattcctgatgtgct

SEQ ID NO: 879861 - DNA, 99 bp, Homo sapiens
gaagatgaagaaacccagcttgatatgttggagaacgtcagctgcctcaacaccagcctggtgatcctgatgctggcccgacggaaagagcggctgccc

SEQ ID NO: 879862 - DNA, 99 bp, Homo sapiens
agcacaaccttgttgcatgccagataaatgatcagtatgaatctgatgaacaagaaaagagtgcctatcaagagtatgacagtgacagtgatgttcctg

SEQ ID NO: 879863 - DNA, 99 bp, Homo sapiens
ctcgtagtgctttttccgaagctctcccagtttttgacgctccttctgcaattcattttctagctctagcaccctaaccaaaagctgccttgagggaga

SEQ ID NO: 879864 - DNA, 99 bp, Homo sapiens
ctttcctttgcaattcagtgcagtaggatactgaaactgacattatttggaaatctgagaatgaagatgacagcgagtgggaagatgtggatgatgaga

SEQ ID NO: 879865 - DNA, 98 bp, Homo sapiens
aagaactcgtcatgctctttgtagcgtggtgcttctgttgctcacagcaaagtgcctgcattcgtgaggatgattgctcccgagggctccttggtgtt

SEQ ID NO: 879866 - DNA, 99 bp, Homo sapiens
gaagaagtagttataaaagcaaacacaggattcaccacagtacttcacatcgtcgttcacatgggtgtgcaacttgctttggtgtttgctgttttattg

SEQ ID NO: 879867 - DNA, 99 bp, Homo sapiens
gcagtttggcgtgacatacctggaggactattcggcagagtacatcattcagcaaggtggctggtgctgtccccggcataggtccatctctgcagaagc

SEQ ID NO: 879868 - DNA, 99 bp, Homo sapiens
cgtgggcgtaggaccctccgagccaggaggaagcctttttgagtcaaacctggagaatgaaggaagcatttctggcagtgattcaacattttataggca

SEQ ID NO: 879869 - DNA, 99 bp, Homo sapiens
cagccaaccgcaaacgcgcggcctactacagcgccgcggggcccaggccgggagccgaccggcacagcagtatgtgggtgccccggtggcttatgtcca

SEQ ID NO: 879870 - DNA, 98 bp, Homo sapiens
acagagatacccagacaacaggatcgtctcgtccaaggtcccgacatctgtggccctggcaccaagaaggttcatgtcatcttcaactacaagggcaa

SEQ ID NO: 879871 - DNA, 99 bp, Homo sapiens
cgggcagtttgtcgaacgatgttggactcatagtcactgccagaaagggaagaaggagaaagggccaacccctgaagaagcaatacagaaactgaagga

SEQ ID NO: 879872 - DNA, 99 bp, Homo sapiens
tgagattgtaccccacgagctgccacacggcctgcactctgcgctttgagctactgggctgtgagctgaacggcgtggtgaccaagatgaagatgcaga

SEQ ID NO: 879873 - DNA, 99 bp, Homo sapiens
tgcataatgatctggaactgctgacacaatactcgtcatacttacctggttgcttgcgcatctagtaatgttggatcatattctggatgttttgaatac

SEQ ID NO: 879874 - DNA, 99 bp, Homo sapiens
aggcggagccgctgtcctcgtccccagcggtcccgcccaacgcccgactctgtccctgactatggctccccagagcctgccttcatctaggatggctcc

SEQ ID NO: 879875 - DNA, 100 bp, Homo sapiens
gatcgagaccatcctggccaacacgggccatgaagcccccaggaggagaatcgagcaatctttttggaagtccagaagaagctactccttccagcaggcc

SEQ ID NO: 879876 - DNA, 99 bp, Homo sapiens
tgctgaagaactcgcaagctcctacgaaagaaagctcatcgagggtggcaatgaccatgagatcttcacagaccccagaaccatgggctactccgtgac

SEQ ID NO: 879877 - DNA, 99 bp, Homo sapiens
ggacaaagctgttgtctcagggagcacagaagtcactcagctctatgtgccagcatccagacatgtgtggaggttccggcggatggggaggataggccc

SEQ ID NO: 879878 - DNA, 101 bp, Homo sapiens
ctaacacggtgaaacccagtctctgcctcaacaatttctcaatggccgacattaccaaccataaggcctctccaaactactggttcactttcttcaaccag

SEQ ID NO: 879879 - DNA, 99 bp, Homo sapiens
gagttcccggaggtctctcgcgggacctctctcaccgccaccggttgtgaggggatgtgggacaacataagctgctggccctcttctgtgccgggccgg

SEQ ID NO: 879880 - DNA, 99 bp, Homo sapiens
tggaaagtcctgaagaaatccagtggctaacatgcttgaatcaaagtcctttgaagtagaactcaaagatgctgaacctgatattattgaacaactggt

SEQ ID NO: 879881 - DNA, 99 bp, Homo sapiens
ggtgtttgtccagcgactccggggcctgatgaatgacatcggccgcatggcattctctgctgtggacgtgcatatgtattgaatcagtcccccacaggt

SEQ ID NO: 879882 - DNA, 99 bp, Homo sapiens
agctgacctggccaacaaacgtatggtggagtatgaatcaccgtcccaatgagaaacaagaaggagcaccctccacatggactcccacctgcaagtgga

SEQ ID NO: 879883 - DNA, 99 bp, Homo sapiens
aaaatacaaatcacacgcataatggatgaaaggaaccgacagatatgcacccaatgtccagggagcgtgcaaaatttgtcaaaagtggccttttattgt

SEQ ID NO: 879884 - DNA, 99 bp, Homo sapiens
caggaatctcagagctgtttctgccagcagagctatgttttcttcacatcaaaggaaggcttgaagagtttgtccttggacaggaattttgatggtgta

SEQ ID NO: 879885 - DNA, 98 bp, Homo sapiens
tggagtgtacaagtccgcggagcagggggaggtgacagccgctcaggaagcaatcttgcatgcgtctggaaatggcacaaccaaggactactgcatgc

SEQ ID NO: 879886 - DNA, 99 bp, Homo sapiens
gaaaactgggcctattacaaaggcttggaaaaagcactcaagccagtgagaaagatcagtctaaagaaaaggagaagaaagtgaaaaaaacaattcctt

SEQ ID NO: 879887 - DNA, 100 bp, Homo sapiens
ctggagaacttctatttgtcttcagaatgcagattcttcctgaactaataaattatcttcatcttggtgtaagtagaggagagaagggctgatctccatg

SEQ ID NO: 879888 - DNA, 99 bp, Homo sapiens
gccatggcgaccggagcgaacgccacgccgttggcttcggaaccaaaaagaagcttcccagagccggggccaggagccccaagcgccctctagcagcaa

SEQ ID NO: 879889 - DNA, 99 bp, Homo sapiens
tgggatgtgaggagcgcctctgcccggtcgcgaccccgtctgggagtgccgtaaagcaggacttgctctctctaaacactataaggtttacaagcgtcc

SEQ ID NO: 879890 - DNA, 99 bp, Homo sapiens
ggatgaaaatgaagacgacattcagtttgtcagtcaaccccaaggtccaggtggaggccatcgaagggggagccctgcagaagctgctggtcatcctgg

SEQ ID NO: 879891 - DNA, 99 bp, Homo sapiens
ggagcagaaagcgataaaacagaaaaatctgttctcaattgcatttataagctctatcgtccgagctttgtgcacccaggggctgccacagtccccacc

SEQ ID NO: 879892 - DNA, 99 bp, Homo sapiens
gcttggaaagacgtttcttctcttggcaagagagctctgcatcaatgcgccggccataggcaacggggtggtcatccacttgccaggcttgtttgagga

SEQ ID NO: 879893 - DNA, 99 bp, Homo sapiens
ggtagctcacgcgatagaaacgtgttcgctgcccagaagaagggaaggcgcgagtgaggaaaggaggtactgtaggctgtacatccttttgaaatccca

SEQ ID NO: 879894 - DNA, 99 bp, Homo sapiens
tcattgccctccagcacagtcttgttacccagtaactaccaaacatgaatgtagtgacaagctggcccaggacattgtcaatacctctggccgcttctt

SEQ ID NO: 879895 - DNA, 99 bp, Homo sapiens
tgactttagtaagccctatgtcagggtaactatggaagaagccagcagaggaactccttatcctttcccggagttcagttatgggtgtgagaggtttgc

SEQ ID NO: 879896 - DNA, 125 bp, Homo sapiens
caggaacattttcttcgcagattgagaatacacccatcctgtgtccttttctgctcaggggtcacatcatagggcagtttgtcaggcactggttgcaaatgaaaaggacacaggatgggtgtatt

SEQ ID NO: 879897 - DNA, 99 bp, Homo sapiens
tgacaactgttggacaacaaaaaatgaaaacttagattgcaacagtgattcacaggtgtttccctctttgaattgtcagtgctacaatggagttctctt

SEQ ID NO: 879898 - DNA, 99 bp, Homo sapiens
gttggataccccattgctgcgaatcagccaggagaaggcgggcatgctggatgtcaactttgacaaggcctattccctggtggattccagtcaagtgtc

SEQ ID NO: 879899 - DNA, 99 bp, Homo sapiens
gaaccggggtttggagggcagaaattcatggaagatatgatgccaaaggtaggagcattgcttttcgtggtgaaagaggcaatgatgaatctgccatcg

SEQ ID NO: 879900 - DNA, 99 bp, Homo sapiens
ctctgcaggaagccaaggagcacagggtgtccctgaagtgccgcaggcagctccgtgtggaggagctggagatgggagaaaactggttgtcctggatgt

SEQ ID NO: 879901 - DNA, 111 bp, Homo sapiens
gcagcgagtggagcagtacttagaagaactcccagacactgagcagagtggaatgaataagtttctccgaggtttgggaaatctatacctttggaagaatattgggaaaag

SEQ ID NO: 879902 - DNA, 99 bp, Homo sapiens
cttgtacagcaatctcctcctccactgccactacagggaagtgcatcacatgtcaggtagtaagcattaataatgtctttcatctttgagtggatctac

SEQ ID NO: 879903 - DNA, 99 bp, Homo sapiens
cattctaacagccagccactgccctggaggaccagggggagagtttggagtgaagtttaatgttgccaatggagatggagtctcgctctgtcacccagg

SEQ ID NO: 879904 - DNA, 99 bp, Homo sapiens
gttttggggccattggtgggggcggtggaccagggcaccagttcgacgcgctttttggataaaagaatcagagtgtctcaacccttgacaagaggacca

SEQ ID NO: 879905 - DNA, 99 bp, Homo sapiens
tcgaggcggcgggggacaagtcggcgccccagagcggacgaggctttggatgaagagtatttaaaagtagatgcccaatttggaggcattgatcagaga

SEQ ID NO: 879906 - DNA, 99 bp, Homo sapiens
gtcggagtctgggggttcgcgcccgccgacccgcgccctgctccctctcagcacctgggcggacggacagaatgacttggaagataacggagcttcgaa

SEQ ID NO: 879907 - DNA, 98 bp, Homo sapiens
tggagggcactaccagatgggggctacttctacaagtccgaacagccagtccagcaaaatgaacagcattgtctaccagaagcagttccagtcagccc

SEQ ID NO: 879908 - DNA, 99 bp, Homo sapiens
cctttggcataattctccctctgtgtctcttgaagaacttaggttcagggcggactctccgggagactgtcctggaaagttcgcccatcctcaccctgc

SEQ ID NO: 879909 - DNA, 99 bp, Homo sapiens
ctccattggatttaaaagacagtcctcgtcagcactgactttcagctatggaatcgactattgtgtcaaagaatgcactgcagtaccggggaaattccc

SEQ ID NO: 879910 - DNA, 99 bp, Homo sapiens
gccgggccctcaagcccagtcgggactcgagcctagggaggcgaggttcccgcaccggataggatatccacctttctgctctgaaacacctcaagaaac

SEQ ID NO: 879911 - DNA, 99 bp, Homo sapiens
catgatgaaagtctcgttcctgttcctgctaacagttacttagatcctgataacttaagtgactctctcttttccggtgatgaagaaaatgctgggact

SEQ ID NO: 879912 - DNA, 99 bp, Homo sapiens
gaggctgctggaatcgactggggcatcttcccggaatcagattcaaagtgaaagcagcccagagcctccccacggtcaacctgcagcctctggaatggg

SEQ ID NO: 879913 - DNA, 99 bp, Homo sapiens
cagacttgaaagtgcctgccaaagccaagctcaccaaactgaagatgccttctcagtcagttgagacccaacatgagtgaagtttcctgcaagaaacgg

SEQ ID NO: 879914 - DNA, 99 bp, Homo sapiens
tctgtatcctgatggtgaaggaggtcggatgacgggaagaggcaagaccattgaacagtttgatgtcgcaactcacctgcaaacagccccggagctagt

SEQ ID NO: 879915 - DNA, 98 bp, Homo sapiens
ttagttgtgtgtatagttgcccatcttatatagcaaaagatttgatgaaagtacttcagggagtcaacggtgagactgtgaacctgaaagcatttctg

SEQ ID NO: 879916 - DNA, 99 bp, Homo sapiens
tggacaaagctgttgtctcagggagcacagaagcttgtaattccacatctgaagtcaaagatctattggaacagaaaagcaagttgaccatagaagtgg

SEQ ID NO: 879917 - DNA, 99 bp, Homo sapiens
gtttcctgcatgaatgaaataggctggtctgcagtgagcccttggattctagccagcacgactgaaggagactggcagggtacttccatagacaggaac

SEQ ID NO: 879918 - DNA, 99 bp, Homo sapiens
cgctgcatgtggtgtgtaatgacttgtacatcaataggttttggctgtgcaatatttttagaagacataattgcctgattatagaatgtacggccaaag

SEQ ID NO: 879919 - DNA, 98 bp, Homo sapiens
gccacctactattacccccagtatctgcaagccaagaagagaagctgaatttggacgacagccagtgggaggacatccacgttgtcaccggagcactg

SEQ ID NO: 879920 - DNA, 99 bp, Homo sapiens
gagccagcacagcactcattgcagcaacccctggtgcgactgagaggcggtgcctacatcggggagggccgcgtggaggtgctcaaaaatggagaatgg

SEQ ID NO: 879921 - DNA, 99 bp, Homo sapiens
tctccaccccgtgtccacagcagtcctagaggagcagcattcggccagagcccccttgctggattatatctacagggcctcaggagtgcaagtagctga

SEQ ID NO: 879922 - DNA, 99 bp, Homo sapiens
gatgatccaagtcaccaagaaattactgtctcaagtgatacggaacttagtgatttggcccgtgaccctccagcacaatgttctgcaggtccagttggg

SEQ ID NO: 879923 - DNA, 99 bp, Homo sapiens
cctcctgagtagctgggactacaggtgccttggcatctcccaatggggtggctttgctctgggctcctgttccctgtgagctgcctggtcctgctgcag

SEQ ID NO: 879924 - DNA, 99 bp, Homo sapiens
gtgagtagagccgcccgggcaccgagcgctggtcgccgctctccttccgagcctcattttacagatgaggaaactgaggctggctgcgtgctcagaggg

SEQ ID NO: 879925 - DNA, 98 bp, Homo sapiens
cacacagactcggcggtaccccagctccatctcttcatcaccccaaaaggacctgactcaggcaaaggacacttgggttgaattcagtaagtttcctc

SEQ ID NO: 879926 - DNA, 99 bp, Homo sapiens
cagctgtaccagtccgccattttgctaccaagaaagccaaagtatactgcatgataaacacaggaactcaaatggatttagaggttaaaggagttgctg

SEQ ID NO: 879927 - DNA, 100 bp, Homo sapiens
atcttcatgtcttttgctctccggaatttaagcacagtcccttacccttctgaatgtgctgcccccgtgcttaaattccggagagcaaaagacatgaaga

SEQ ID NO: 879928 - DNA, 99 bp, Homo sapiens
agagagagcttgtgaaactgagggaataggtgtgggcagaagaaaaagctagtgatcaacagtggcaatggagctgtggaggacagaaagccaagtgga

SEQ ID NO: 879929 - DNA, 99 bp, Homo sapiens
attcgtcctgcagaatcacgcggacatcgtctcctgtgtggcgatggtcttcctgctggggctcatgtttgaggatctcttgaatcgtgtagaagattt

SEQ ID NO: 879930 - DNA, 99 bp, Homo sapiens
ttggagatggggaccgccctggacatcaagattaaaagagcgaataaagtttatcacgccggggctgatgtttcagacaccgcaggaaatgggcttaat

SEQ ID NO: 879931 - DNA, 99 bp, Homo sapiens
gaagcggacatcaggggcttcgtggccgctgtggtgaatgggagcgcgcagggcgcacagatcgacacagctccgaattgattccttctttagattagc

SEQ ID NO: 879932 - DNA, 98 bp, Homo sapiens
agcactgactttcagctatggaatcgcatttgacattgtgcagcaaagaaatggttatggagaagcccagtccgctgcttgtagggcgggagtttgtg

SEQ ID NO: 879933 - DNA, 99 bp, Homo sapiens
gtcctcaatggttgatcggcctctcgggcccatttgaaaagattctcgacaattccctcccaagcaggtatgacctgcaaatgatgtccatggctcttc

SEQ ID NO: 879934 - DNA, 98 bp, Homo sapiens
aagaatggttgagaccggtgatgagaaaagagaagcaagtgttagtgcattggggcttttacccagacagctcagccagacgtccaggatcccacccc

SEQ ID NO: 879935 - DNA, 99 bp, Homo sapiens
ctcggatacagcagtgaataaaaggacaaaaggtcttgaatgggaaaaagaaagctgctgcttgtgggggattccacagtagagacggggtttcaccat

SEQ ID NO: 879936 - DNA, 99 bp, Homo sapiens
atgatactctcttcatgatgaaggaattggctggtgccaagacagctgatgagtgggctgagaaaatgcccaaaggcccgccgcctacctctcccaagg

SEQ ID NO: 879937 - DNA, 99 bp, Homo sapiens
ccaatagaaaagcagaaagccgcctcttggtttgcgtcctgcactgaaaggaaatgacggattttgaggatttgttggtattgaggaaaacggtgaaat

SEQ ID NO: 879938 - DNA, 99 bp, Homo sapiens
agtggggcattggagactccattagggcctcccaggccctacagcagaaacacgaagagattgagagccagcacagtccatcagaaaaaattcggattg

SEQ ID NO: 879939 - DNA, 98 bp, Homo sapiens
agtgaggaagaggaagaagaggatgaagatgtggatctggcccaggtactggcctatctcctccgcagagctccgagtgcagcagatggtgtccatgg

SEQ ID NO: 879940 - DNA, 99 bp, Homo sapiens
ctagttttgacccctcgagttaatctctccaaaacaagttgaacgaagagtggaatgcactgaaacatgttatcatctctgctgctgctgctctgttta

SEQ ID NO: 879941 - DNA, 99 bp, Homo sapiens
gccctctccagaaaaacagtagcagtttcctggtcctgttcctcatcaacaccaaggatctgcaatgcgctggctccctccctccgaggctacttctca

SEQ ID NO: 879942 - DNA, 99 bp, Homo sapiens
gcccgttgtcccggccacgcttccagagaaaaccctcacggtaccctaatctgagctctccgaagttcccacatcctatcttcttgccaaccctgaagt

SEQ ID NO: 879943 - DNA, 98 bp, Homo sapiens
tcctgtgtaaaacagcaattggagctctaaaattaaacatcggggacctacaggttacaaaggacttgattattcttagaaatgcacttgacctgctt

SEQ ID NO: 879944 - DNA, 99 bp, Homo sapiens
atgggttgtgaaattttcagcatgtggcaaaacctagtgggagattttgataagatctggcgagaacactgtgaggatgaagaaactctttgtgaatat

SEQ ID NO: 879945 - DNA, 99 bp, Homo sapiens
ggggcgggacctggcgccaccttgcagtccaagtggtaagaagttcagaagcaagcctcagttggcaaggtacctgggaaatactgttgatctcagcag

SEQ ID NO: 879946 - DNA, 99 bp, Homo sapiens
ccaagaatccttggcccaatgtagatgctcacagtggggtgctgctccagagatggatttataaaagctattggtcctgctgatgttattcaaagacag

SEQ ID NO: 879947 - DNA, 99 bp, Homo sapiens
tgctctccatggagagagtaactctgtccttattatcggaccccgaggatcaggaaaaactatgggttccattcagagccgatacatcagcatgagtgt

SEQ ID NO: 879948 - DNA, 99 bp, Homo sapiens
tcccatttcgcccctcgcgtccggagtccccgtggccaggctgcaagaaagcgtaagattgccattcgaaaagcccaggggaaaaatgtggaggccatt

SEQ ID NO: 879949 - DNA, 99 bp, Homo sapiens
cgactattgcagttcgtcactggaacctgccgtttacctctaggaggatttgctgagctcatgggaaactcaggttgaataattcatcaaattacacaa

SEQ ID NO: 879950 - DNA, 99 bp, Homo sapiens
tcaagggtcagagtcaacaagatgaccgcaatccccttgttaatttggagtggcccctggagtcagtttcctacaccatccgaggccccacccagcacg

SEQ ID NO: 879951 - DNA, 98 bp, Homo sapiens
agcagttccagtccgttgctttactttttgcttcaccgacatagtcattatgccgaagagaaagataagcgtgtggaaaattggcctctgatgcagtc

SEQ ID NO: 879952 - DNA, 99 bp, Homo sapiens
gatccacttggacctaattgctattatgacaaaactaaatccttctttgataatatttcttgtgatgacaatagatggagtttcgctcttgtcacccag

SEQ ID NO: 879953 - DNA, 99 bp, Homo sapiens
gatatgcctgctaacatggataagcatgccctgaaaaagtatcgtcgagaagcctatcatcggaaagtggagaatgaggacatgaataaagaccagatc

SEQ ID NO: 879954 - DNA, 99 bp, Homo sapiens
tctttgcaaagttgataacatttcaaaccctgaaggacagtgacttattatgtgaccaagaatatggcccaggtgaccaaagccctggacaaggccctg

SEQ ID NO: 879955 - DNA, 99 bp, Homo sapiens
cactcttggaaagccctggtacatgacggagggaacttacgttactggcttgaagaggcagaatgcagagatcagtacagtgtgatttttgagagtgga

SEQ ID NO: 879956 - DNA, 98 bp, Homo sapiens
gcaatttgccatttatttgtaataagatgggagacctttaactctgaaggacatatgggaaggagttcatgagtgctataagatgcgactgctacagg

SEQ ID NO: 879957 - DNA, 99 bp, Homo sapiens
ccagcttcatagtaaagattctctttcagagctggagtcaactcttctctgctatccttagcaagcataacagcatgttctgaaacttcagctgcttct

SEQ ID NO: 879958 - DNA, 99 bp, Homo sapiens
aacaaaagaagaagtatttggggagaatgactgaggagccattgatgtgttacctgtttgaaaatggtagaatagataacatttttactgagccctatt

SEQ ID NO: 879959 - DNA, 142 bp, Homo sapiens
gatgattcatccagcactgcacagaccctggagctgctctgtcaccttgacaacacagcccatggcaacatggcctgatatcacacttcagtggcttattcagcattcaaaatctagaagaagctgaagcatctcctgaagt

SEQ ID NO: 879960 - DNA, 99 bp, Homo sapiens
ttagcaagcaaatatttacatgttggttatattgtgccaccagctccagaaaagagtatagtagtctatttgcgcagccgtggcatttttctacagcaa

SEQ ID NO: 879961 - DNA, 98 bp, Homo sapiens
gccgagggcgaccagatcaacgccagcaagaacgaggaggacgcggggtaccagctgaagctctttgcccgcatgtgcttggaccgccagtacttggc

SEQ ID NO: 879962 - DNA, 99 bp, Homo sapiens
gctggaggctctgtgtgtggatccatccctaccagggactcagcagggcctaagcagggggagtgggagaacagaccccaagaggaaggaagacctcat

SEQ ID NO: 879963 - DNA, 99 bp, Homo sapiens
cagcaaatgcaactagccaatgccatgatgcctggtgccccattacaacccgtggagtcggatggtcagggctgccctttctgtcgttgtgaaataaaa

SEQ ID NO: 879964 - DNA, 134 bp, Homo sapiens
ggttttgagaacagagtgctgttttagagctggcagcagcatctcagcccaagagaaggaaatcaaagagcaggaggttgtggacaaagtcatggaaacactggacaatgatggagacggcgaatgtgacttcc

SEQ ID NO: 879965 - DNA, 99 bp, Homo sapiens
caacaacctcaccgtgcaccttcgcaagaagcaccagttcaagtggccctcagggcatccccgttttcgaggacaaaagcatgtcttcccttcctgggt

SEQ ID NO: 879966 - DNA, 99 bp, Homo sapiens
ggacattctttgcagagaaattcaatgcacacatcgatcttccctttaatagcagcttcatgcagaggtgtatagttccagttatccctggcatttgga

SEQ ID NO: 879967 - DNA, 99 bp, Homo sapiens
cgcggcggctgcgaaggcggcggctcctgccctctcgctttccctctcgcgtctctggctgcagagacacctatggctgccgatgaaggctcagcagag

SEQ ID NO: 879968 - DNA, 99 bp, Homo sapiens
gcagcccaccagggagctcctgcagcgcctgattgaggaagagaacatgctggcaccatctctgaagcagttttccctacgagtggagattttgccatc

SEQ ID NO: 879969 - DNA, 98 bp, Homo sapiens
ttatttagttctggggagcgcctcgtcgacatgagtgatgtggaggaaaacaacttcgagggcagaaccttcacggcatggtgcaactcccacctgcg

SEQ ID NO: 879970 - DNA, 98 bp, Homo sapiens
tggacagaattatgcagttgctcgatgtgcctcctggtgaagacaaggggggatatgtgatcaaagcatcagaagattctcgctgaagtctgttaatt

SEQ ID NO: 879971 - DNA, 99 bp, Homo sapiens
agaagaaggccttgactacggaggggttgccaggatcttaaatgtatttcggcattgggttgaacatcatttttatgactttgaaagagacttggaatt

SEQ ID NO: 879972 - DNA, 99 bp, Homo sapiens
cgttggcactgctcaacttgttctcatccttaggtactgagctgtgaaagtcaggttccctttggcaaaagcaggtgactcccactgtagaatgttctt

SEQ ID NO: 879973 - DNA, 99 bp, Homo sapiens
tgcttttgctacgacctcattttctgctggaactggagaaatcccttctgcaaatggttcctttggatgaaggtgccagtgagagaccccttcaggttc

SEQ ID NO: 879974 - DNA, 99 bp, Homo sapiens
acctcggaaactgaagatgaggttgccatgggaactgctggtactgcaatcattcattttgtgccttgcaggtctcctctgagcctccggcctccataa

SEQ ID NO: 879975 - DNA, 99 bp, Homo sapiens
ttaactgttggcgaaaattatttgggtgcagtcagcctcagtttccaaagccggaaaaggatcctctagtagccacggtgtggcagctgctctgaacca

SEQ ID NO: 879976 - DNA, 99 bp, Homo sapiens
aatccctacgcgtccctttgggtttagcacgatgagctcaatcggcactggggaagatgatccctatgatcttgaagatgtttctgcacagaaatgagg

SEQ ID NO: 879977 - DNA, 99 bp, Homo sapiens
tttcacaagtagcaaatgagatgaaccatcttcctgcacacagccaaagtctgcaaaggtattctttaggtgatgctagaaggcctcttcatgaaacag

SEQ ID NO: 879978 - DNA, 98 bp, Homo sapiens
atgactttgagccctaccttactggacagtcaaatcagaatagcctaacatggcagaccagagacagcgctcactgtctacctctggggagtcattgt

SEQ ID NO: 879979 - DNA, 99 bp, Homo sapiens
ctcgatggcagcgacacaattgtctgtgacagtaacagtacttgggatcccccagttccaaagtgtcttaaaggtacagtatatcagaagtatgagccg

SEQ ID NO: 879980 - DNA, 99 bp, Homo sapiens
actgtcactccctgccccgcttccgcagggcccctttccagattggagatttctggcacgataaatgagtacatgtcccagagcaagcacacggaggcc

SEQ ID NO: 879981 - DNA, 99 bp, Homo sapiens
gtgggtcctcagcaagagcacatgacttatgatataaatcttccatactagggctagccatcagcattaccttccacttgataggtatttccttttagg

SEQ ID NO: 879982 - DNA, 98 bp, Homo sapiens
cgggacaactccgggatgatcgataagaacgagctgaagcaggccctctcaggtttcgggggggccctcagcctcttggccttgaacgggctgttcat

SEQ ID NO: 879983 - DNA, 100 bp, Homo sapiens
tgtgcaatcttgtccttgaggtaggcgcctttctgccattcagacttgagttccagccactcatagaatgggacctcttcagtgccacctcaggttgcac

SEQ ID NO: 879984 - DNA, 99 bp, Homo sapiens
ggaaggcgtcggggggaatctcgcgagggttggagttttggcgagagtttgtggaagatggcgcctgttgtgacaggtagagacggggtttcgccgtgt

SEQ ID NO: 879985 - DNA, 99 bp, Homo sapiens
agccacttctggaaatggagtgaatggagtggtcagaacttcaccacacttgaagctggcaatgtgcagaatatacacaaggaagataaacctttaagt

SEQ ID NO: 879986 - DNA, 98 bp, Homo sapiens
cggcagcgcccggcgacccctgctgctgctactgctgttgctgctgctcggtcacggagctgctggacgtctccatggagctgggctgtttcctggct

SEQ ID NO: 879987 - DNA, 99 bp, Homo sapiens
aagctctggactgagaccatctaccagtctgcaagcgtcttcaaaggagccccacatgagattggagctggagtgagccttccaggaattttggctgcc

SEQ ID NO: 879988 - DNA, 99 bp, Homo sapiens
atcggcgcccagcaatcacagaagccgacaaggcgttcaagcgaaaacatgaccgctgagcccatgaggttatgcaatggtctctgcaagatggtttat

SEQ ID NO: 879989 - DNA, 100 bp, Homo sapiens
agtgtatctttgggagagcaaggcacacataagtgcccgcatctgatggtttagctgatgaaatctgccgctgtgctaggaaggtctcccaaagatacac

SEQ ID NO: 879990 - DNA, 99 bp, Homo sapiens
ttaatagttgctttgattgggattcacccccaaggagtctcgctgcttttgtgactgtcttctgaagattgatgtctatttccttgagctctttaattt

SEQ ID NO: 879991 - DNA, 98 bp, Homo sapiens
agagtcatacctggagcagcaggtaatttcatctgtgccaaagcctccagaggacaagccagaagatgtacatacaagtcatccattaaaacaaagaa

SEQ ID NO: 879992 - DNA, 99 bp, Homo sapiens
tcagagcgagcttcggagaagcagtggtgggttccatgtgatggtggagtaggaggcaggtctccgcgatcctgataacttaagtgactctctcttttc

SEQ ID NO: 879993 - DNA, 98 bp, Homo sapiens
ccggccccgcgcgcgcctcgaggccgagtcaaggctcagctatgtgaaccatgcagaggacctggcctccaagctcctacaatgttccccaaagaaca

SEQ ID NO: 879994 - DNA, 132 bp, Homo sapiens
acagctgcctggtgcgcaaccccgtgctgcagcaggatgcgcacggctctgtcaccatcacagggtctgcaccccttcgtgaggactgaagcctggaaattcctcacgggctacttctcatggcagagttcc

SEQ ID NO: 879995 - DNA, 99 bp, Homo sapiens
aaatgaagatgcagtcagagagactttcgaaagaatatgatcaactcctgaaagaacactctgaacttcagaaatgcactcggtgatggaaagagagcc

SEQ ID NO: 879996 - DNA, 99 bp, Homo sapiens
cccgcagggactgcagctctgcctgctgcagcgagatctcatccattgtcttgtaacatggtgggttggagttaggatcaaactccatctctgaaggga

SEQ ID NO: 879997 - DNA, 99 bp, Homo sapiens
gagaagagccatggatcataaagagacacataccaaattggatctatccagaatctccgccacctccctactctcggctgtctcctcgcgacgagtaca

SEQ ID NO: 879998 - DNA, 98 bp, Homo sapiens
ctgagactgctccagaagtggagaccagcagaactccaccagagtatgccaagatggaaggaagcctcatacagtgagattaataatccgtcggtatt

SEQ ID NO: 879999 - DNA, 98 bp, Homo sapiens
tttggggttgccatcggcccgtagtatgtgaaaattcacaaagatgtccaaaactaatggcttatcagaagatttgatatggcactgtaaaacactga

SEQ ID NO: 880000 - DNA, 99 bp, Homo sapiens
gatcctccagttcctgcacatctaccacgccgtcaaggaccggcacaaggacgttctcaagtggggcgatgaggcttctttcatcgagacttaaagcct

SEQ ID NO: 880001 - DNA, 122 bp, Homo sapiens
cggtgcatggcggtctgtcggcggagtcgccctcgggggctgtcagcctcttcggtgatctttggtctgaagggctatgtggctgagcggaagggtgagagggaggagatgcaggatgccca

SEQ ID NO: 880002 - DNA, 99 bp, Homo sapiens
atgctgagacacatgttacagcttcagtgtaacgctcaggcgatgaccaccatacaacacacaggagtgggaggagcggcgcaggcagaacattgagaa

SEQ ID NO: 880003 - DNA, 98 bp, Homo sapiens
cgcgttcagaggcgtcgggctgctgaacaccgggagctactatgagcacgtgaagaaccagacgtcctgggtcctctccagcatggcagccctctact

SEQ ID NO: 880004 - DNA, 99 bp, Homo sapiens
cggaagcaacccgatcccggaggcggcggcggcggggggagccggagccgcctgggatgttcagtgtgcaactgaggaacatggctcaagaaactaatc

SEQ ID NO: 880005 - DNA, 99 bp, Homo sapiens
atagctgtttgtattttggctgctgcaggagccattttagcttccctctgtgtgttgcagtcctgtggcattatgcatgccccctcccagtgaccccag

SEQ ID NO: 880006 - DNA, 99 bp, Homo sapiens
gggaaatgtagtgaccagttacattctctcgttctcgtccctcagccttgcagcaatccagcagttgcagtcgggtctcctttctaacaaatcctaaag

SEQ ID NO: 880007 - DNA, 99 bp, Homo sapiens
aagaagaaacagaagaaaagccttcagtttggctgtgtcttaaatgtggccatcagttgcagaactgctttattcactgcagtggtgtgaagaattaga

SEQ ID NO: 880008 - DNA, 98 bp, Homo sapiens
gaggagccgcgagcgctgagggttgtctgcattcaaaagagcattctattaaagctaccttaatttggcgcttatttttcttaatcatgtttctgaca

SEQ ID NO: 880009 - DNA, 99 bp, Homo sapiens
cacctcctcgccagcagccgtccggagccagccaacgagcgctgctcagatggaagataaaaagccctttatcctgtcttccatgaggcttcctctcct

SEQ ID NO: 880010 - DNA, 98 bp, Homo sapiens
cactgatgaggatcagcccatggctggactctgtgaagctgagcaggagcagatgcggaagatcctctaccagaaagagtctaattacaacaggttaa

SEQ ID NO: 880011 - DNA, 99 bp, Homo sapiens
aggatggccgggacgaggccaattgccgagctatgaagacatgattggtgaggaggtgccatcggatcaatactactgggctcctttggcccagcatga

SEQ ID NO: 880012 - DNA, 99 bp, Homo sapiens
atggtggcaccaaggctggaggcaaggacattggcacaggttctttctccagtgcacagtataccaaaaacatggcctgtaatcccagctcctcaggag

SEQ ID NO: 880013 - DNA, 99 bp, Homo sapiens
ctctgaaagctagaagaaaaggtgtacttgcaagaaacctcaggacttgagtaacagcaacatgtgcaagaactatatcagccagtattctgaaattgc

SEQ ID NO: 880014 - DNA, 99 bp, Homo sapiens
cagaaaatagcagccaggaaccaagaaaacttggttcaaaatggaaagtatttattgaccaaattaacaggtctttggagaattacgaaccatgttcaa

SEQ ID NO: 880015 - DNA, 98 bp, Homo sapiens
cctgagcccgaggtgctgacgtcgcaaaaaaattggataatggagtcatcagaacccactgtgaggaagtgacttctccttgaggtcacccagacact

SEQ ID NO: 880016 - DNA, 98 bp, Homo sapiens
ccgaatatactgggcctgagagttacgtggcagaaatgatcaagagtccggcagcgtcttctcttgagggagcaatttggagaagagctggaacccag

SEQ ID NO: 880017 - DNA, 98 bp, Homo sapiens
gaagtcgcaccacggagagcacgagagacccgagttcatcgcctacccccatctccgcatcaggaccaaggtctcctctgagcctccggcctccataa

SEQ ID NO: 880018 - DNA, 99 bp, Homo sapiens
cttttgtccctttgcctcatcccaggttgccttggaaaatgccaacgccgtgtctgaagtttattaaccttgcaagaactcttcaggcacatatggaag

SEQ ID NO: 880019 - DNA, 98 bp, Homo sapiens
gctacttcaaagggtactttttagaaccaaagattatttgcatgggtgcaaaagaaaatggtttgccgctggagtatcaagagaagttaaaagcaata

SEQ ID NO: 880020 - DNA, 99 bp, Homo sapiens
caagatacaataacttgccaatccacgggtcataggtaaaatagtacatggcaaaaccaacaatgctgtgtcctggtttagaaggatgttttgtatagt

SEQ ID NO: 880021 - DNA, 99 bp, Homo sapiens
taaaaatcaacaccaggactacagtaaggctgaaatcattgaagtgcttggagtgcagaactgaaagagggaggttcccctgaaggatgctaaggaata

SEQ ID NO: 880022 - DNA, 99 bp, Homo sapiens
cagctctttgagtccctccagtcagagctacaaatctacgaggcactttatggcaattccaagaaggggctgaaagtcctgaggctttctaccaatgca

SEQ ID NO: 880023 - DNA, 99 bp, Homo sapiens
caagcagtggcgaagggaatcgcaaggctcttccctgaccattttctactgtccctgcgcgaggacatggacatcttccagcaacagatctcgagaaga

SEQ ID NO: 880024 - DNA, 98 bp, Homo sapiens
cagcctcgagtttagccacaccaggctggagaatatggtgcagaggccctccacgctgttagcagaagagaagagcatctctgctcgctatgccgaag

SEQ ID NO: 880025 - DNA, 99 bp, Homo sapiens
tacaatttctagctttgtaggagcatggcttggagcacttcctattccactggattgggaaagaccatggcaggtggttgtgtcaaaccgattggtgac

SEQ ID NO: 880026 - DNA, 99 bp, Homo sapiens
aatagaatcaaaggctgcaaacctcaataatttggtagtggaagcctatcagcaagatgatgaagtgacgactgttcaggttaaagagcaagaccagag

SEQ ID NO: 880027 - DNA, 99 bp, Homo sapiens
tgagtatgtgaatttcgccacccctgtcccatagcgggctgtttcatagccatccaaaagggtatcaatgagtgctttgcgtacacccttgaaaggcgt

SEQ ID NO: 880028 - DNA, 99 bp, Homo sapiens
aagcaggtccggacccactggctgctggagcttgtcaccaccagaccaagatcactccatggatgaaatgacagctgtggtgaaaattgaaaaaggagt

SEQ ID NO: 880029 - DNA, 144 bp, Homo sapiens
gcatactttgttgtccccacccctcttcctgaagagaatgtgcagcgctttcagggtcatggcataccatttgcattgagactccttgcattccgccagatacacaaagttctaggcatggatccattaccgcaaatgagccaa

SEQ ID NO: 880030 - DNA, 99 bp, Homo sapiens
tggcctcccaaagtgttgggattacagatattcctcttcgtcaagttatagctgaggaatgtgttgcctttatgttaaactggagagaaaatgaatacc

SEQ ID NO: 880031 - DNA, 99 bp, Homo sapiens
ctgcatacggacatgggagacttcatccagctgtctcttcgtctcttcttccatccttcgaatgtcgtccatggtcaggtcaacccacttatcgagcca

SEQ ID NO: 880032 - DNA, 99 bp, Homo sapiens
aagccttgactgcatcaaaaggaaaacttttctttggcatgcagattgaagtaacagcatggataggtccaggcaaacaatttacattttcttatgaaa

SEQ ID NO: 880033 - DNA, 99 bp, Homo sapiens
tcatgtatcccatagctgtgagtggcgatcacgagaacaataaggcttttgatgaggccattgctgaacttgatacactgaatgaagactcatacaaag

SEQ ID NO: 880034 - DNA, 99 bp, Homo sapiens
aacatgatagagcagagtggaccaccccatgaacctcgaggtgctgatactcaaagaaggtttaagttgtctgatctctctataaattccactgaatgt

SEQ ID NO: 880035 - DNA, 99 bp, Homo sapiens
gaagaggattatgaagatgacaaggatgatgatattagtgatactttctctgaaccaggttgggacaaacattcctatggttaccatggtgatgatggg

SEQ ID NO: 880036 - DNA, 99 bp, Homo sapiens
gtacagattttgcccgaggagccacagctgagtcaaagtccatatggaagtcatcactctcccccttggatttcttttatatttctcccaaagaaactg

SEQ ID NO: 880037 - DNA, 99 bp, Homo sapiens
gtctgctcttgggctgctgcttcttcagcacatagactggagatctgtagaaccagatgttgcttcaggagatgatacactctgcgttggcttttcatt

SEQ ID NO: 880038 - DNA, 99 bp, Homo sapiens
ggcggctgcgggctgagcggcgagtttccgatttaaagctgagctgcgaggaaaatggcggcgggagtacacctccagcatgagagccaaatacctcgc

SEQ ID NO: 880039 - DNA, 98 bp, Homo sapiens
gctcccacaggagtcatgcccagtgtgtgaagagagatggaaaacttgatgactagctccaccctaccgcccctttttgcagatgaagacggttccaa

SEQ ID NO: 880040 - DNA, 99 bp, Homo sapiens
cgctcatcgagggacgcccggcccaagtgacagagtgttgctcagttacccaggctggagtgcaatggcatgatcttggctcactgcagcctccacctc

SEQ ID NO: 880041 - DNA, 99 bp, Homo sapiens
tccaaatactgcatatcagaaacaacagggaggtggggaagacagggctccagctaccacaggacgggctctgggtatagccgttccagtcagggacag

SEQ ID NO: 880042 - DNA, 99 bp, Homo sapiens
tcacaaacggcgcacattggtatgatgtggaagatggtcagtaggacagaaggtaacattgatgactcgctcattggtggaaatgcctccgctgaaggc

SEQ ID NO: 880043 - DNA, 99 bp, Homo sapiens
cgagattctaatgcaagagcttgaaaatcatgattcatttcatccacagatcaaacctttccatggctttagctgtataaggcaaatgcatttcaatac

SEQ ID NO: 880044 - DNA, 99 bp, Homo sapiens
tcaggccagtgcgtttgggaatgtcaagctggtggtccacgactgtcccgtctggaatttaattccttttcgaccttcaatccagttccaaggactcca

SEQ ID NO: 880045 - DNA, 98 bp, Homo sapiens
ggattggtgccttccgattcatgctggaatccaacaagggcaaatcaatgttggagttccagctattgcagtacaaggcagacatcaatgcagtgaat

SEQ ID NO: 880046 - DNA, 100 bp, Homo sapiens
tgtccaccatcatccttttgggcttgatcatcgcctcgttgaagcctggacttcacgtgtgtggtaggcgatgatcaagcccaaaaggatgatggtggac

SEQ ID NO: 880047 - DNA, 99 bp, Homo sapiens
ggaagcacaccctgtcctatgtggacgttggcactgggaaggttggcaaaagcagcttttgatgatgcaattgcagaactggatacgctgagtgaagaa

SEQ ID NO: 880048 - DNA, 101 bp, Homo sapiens
ttcaaggcaagaccgaattcagaaggatatcgacgtcgtgatccagaagtccagagctgaggactgcctgtttgcaggatacatgatcccttaattcaggc

SEQ ID NO: 880049 - DNA, 99 bp, Homo sapiens
gtccggattcgacagagctgaagctcattgtcacatttctctctggggagcagtggggtggaaggtatggaaactactaagctgtgactgtcacctttt

SEQ ID NO: 880050 - DNA, 99 bp, Homo sapiens
ggggtgcactatttgggaaaaccatagactttatatgggtacaaaaatcaaaaatggttggaacagcatccattttaagtcgtcgagtttgtcctgtta

SEQ ID NO: 880051 - DNA, 98 bp, Homo sapiens
gaagatggcggatctggaggagcagttgtctgatgaagagaagggttcagccgtgccgcctcgttacgatgaccagtgtggttaagacagtgtatagc

SEQ ID NO: 880052 - DNA, 99 bp, Homo sapiens
ggtgatttctgcatttccatctgagaaccttcagggtttataaatctgacctcattttctcttcatgtcttgagcaaaataaacatcttctactattct

SEQ ID NO: 880053 - DNA, 99 bp, Homo sapiens
agcacgaacaggaggtcgatggggccgcacttgcattctgtgtccgagtccttctgctccccattggcgcccgcggtgaagggcagcttccgcttgctg

SEQ ID NO: 880054 - DNA, 98 bp, Homo sapiens
agtgtgaggagttgctaaatgctcagctatttgaactgctgggacctgaaggacttgaacttattgagaaactcctccagaacagaattacaattgtg

SEQ ID NO: 880055 - DNA, 98 bp, Homo sapiens
ccaggaactgggtgctggtgcctatagcatgagatcttagcaaagcaatgtctcaagatggtgcttctcagttccaagaagtcattcggcaagagcta

SEQ ID NO: 880056 - DNA, 98 bp, Homo sapiens
tttgttaaggattccaagtaactcttatttggtttgagagtaccgtacaggtgagcaagttgcaagacctcatccaccgcagcaagatggcccggtgc

SEQ ID NO: 880057 - DNA, 99 bp, Homo sapiens
gcaaataacttttccttggagagtcataacatatcactgactgtgttgctaacaaccacaagcagaatttgatgacggtggcaaaccttggtgtggtgt

SEQ ID NO: 880058 - DNA, 98 bp, Homo sapiens
cttcaccacgcggctgcacaactgcaggaacaccgtcacgctgctggaggagatgcccagcctacagagtctgagaaggaaatttataatcaggtgaa

SEQ ID NO: 880059 - DNA, 99 bp, Homo sapiens
cgcagcggcggcagcggagagcgagagaggggagcagatcctgataacttaagtgactctctcttttccggtgatgaagaaaatgctgggactgaggaa

SEQ ID NO: 880060 - DNA, 99 bp, Homo sapiens
gaggccctagagctccgggacaatgataagactcgctatatggggaagggacaacgtctgacatgagccgagtgttctgctcacactgtgggaacaaga

SEQ ID NO: 880061 - DNA, 100 bp, Homo sapiens
cagcctcccaagtagttgggattacagatttgaaaaagggcgcatctatacgttcattggagaagtcgtcgtttctgtgaacccttacaagttgttgaac

SEQ ID NO: 880062 - DNA, 99 bp, Homo sapiens
attgctgtcaacacaagagatgatcaggataatgtaacgattgcacttttgcaaattgggaatcgtgaaattcatagaagctgaacaggtgcctgaact

SEQ ID NO: 880063 - DNA, 99 bp, Homo sapiens
gcagaagtcaaaaatggctcgaaccactgagccagcctccatgttttataaccttattataacgatcatgcggaacagactgtaaaacaattggttcca

SEQ ID NO: 880064 - DNA, 99 bp, Homo sapiens
ggattccatacatgggagtttctcctgttgaattctgggagcttctccaggtccagcagggctgagtgacaggtgacctgtgtcaggttgaactgtgtg

SEQ ID NO: 880065 - DNA, 99 bp, Homo sapiens
ccagccttccaagctctactgtgacttcagagacactgccaagcagccttagccctagtgtagaggtaaacaaagctaactgtcgactaccagaaaata

SEQ ID NO: 880066 - DNA, 99 bp, Homo sapiens
acgagtacgactacctattcaaagggcagcaaggagcgcttccactggcagagccacaacgtgaagcagagcggcgtggatgacatggtgcttcttccc

SEQ ID NO: 880067 - DNA, 99 bp, Homo sapiens
cccattcctctcccctattgctggctctgcagggctctgatcaagcggatccaagccatgattcccaagttgtgtgacttcattgagacacattacctg

SEQ ID NO: 880068 - DNA, 99 bp, Homo sapiens
gaattggaagcaccgctgaaaatttgtgggtcaccagaagttgcagtagctggacaggtgctagaaaacttaccccccattggagttttttgggatatt

SEQ ID NO: 880069 - DNA, 99 bp, Homo sapiens
cttcctccaagtgataatccagattttgatccagaagaggatgaacccacgcttgaggcctcttggcctcacatacagataccccatgtttccccatca

SEQ ID NO: 880070 - DNA, 99 bp, Homo sapiens
atgccatctcctgggggaatgtttcctagcactggactgggagctgctgcagcactacgaaaaagaatcgtgtgcagacatggtcagtattggggacaa

SEQ ID NO: 880071 - DNA, 99 bp, Homo sapiens
aggaacagcgagctgtttgacccctttgacctcttcgatgtgcgagactttggaaaggatcagtttgacaacttagaaaaacacacacagtggggaatt

SEQ ID NO: 880072 - DNA, 98 bp, Homo sapiens
agagcattttggaagaggaaccacaagaaaatcaaaagaaacttttgcccttatcagtaacacctgagccggcccaggcctttgtggtgaagcggggc

SEQ ID NO: 880073 - DNA, 103 bp, Homo sapiens
ccagaaggttagaagtgaggttggaagactgaggcaggaagactgcttgagcccaggagttcctgcctcagtcttccaacctcacttctaaccttctggaacc

SEQ ID NO: 880074 - DNA, 99 bp, Homo sapiens
ctttaggtggaagcttgctcacttccgttatttgtgccagttctgggaagtcatcagtgatgagcatggcatcgaccccagcggcaactacgtgggcga

SEQ ID NO: 880075 - DNA, 98 bp, Homo sapiens
aggtgcccagaggactttcttccagcttctgctgtccttctttgtggagagcaaggagttcatgatcaagtgttgcccacaccaaatgcttcatccag

SEQ ID NO: 880076 - DNA, 98 bp, Homo sapiens
caacttacgggaggacggggaaaaagcggccaaagaagtgaagctgctgctactcgatgggacgtctagttgcaagaaaacaagcttggggctcccac

SEQ ID NO: 880077 - DNA, 99 bp, Homo sapiens
ctgtgctggagggtcccgtgccagatcattcaattcccacagctccaaacatctatggctggtgtgtaacgttcctctcctagcagtagttctggaggt

SEQ ID NO: 880078 - DNA, 99 bp, Homo sapiens
gagacaaccgaagatcaccatctctggaaaggtcctacaaaaaagagtataagagatctggaagagtgttgttcgctgcctgtggcatccaaagctgaa

SEQ ID NO: 880079 - DNA, 98 bp, Homo sapiens
tggtgcagccgatggaattcggctctataattcactgaagtcaagtggtggtgctagagaatgaattgatgtatggggttccttttgaatttcctccg

SEQ ID NO: 880080 - DNA, 100 bp, Homo sapiens
tgaaccagggttcatggggacatggcaaaacgctgatactaacctctctgaataagaggttagtatcagcgttttgccatgtccccatgaaccctggttc

SEQ ID NO: 880081 - DNA, 99 bp, Homo sapiens
taccacaccaacagttgctggacagtttgaggatgcagatgttgatcactgaaaatgatttatgcaagtttaagtgtacgaccttctaagtggccacat

SEQ ID NO: 880082 - DNA, 99 bp, Homo sapiens
gtaatcccagcactttgggaggccgagagaatggcaatggtctctgcgatgtcctgggtcctgtatttgtggataagtgcttgtgcaatgctactctgc

SEQ ID NO: 880083 - DNA, 75 bp, Homo sapiens
aggtgatgaaggggataacttctatgtgattgatcaaggagagacggatgaggcaggtggaagtcatcataaagt

SEQ ID NO: 880084 - DNA, 99 bp, Homo sapiens
aagtggccatggggagcctcagcggtctgcgcctggcagcaggcagtaccaagaagcaagagagacctatcttgatctggatagtaaagtgaggacttt

SEQ ID NO: 880085 - DNA, 99 bp, Homo sapiens
caaaagattgagctgcactgtattccttacttcgggatgacttcagacaaaacccttcggatgtcatggttgcagtaggagagcctgcagtaatggaat

SEQ ID NO: 880086 - DNA, 99 bp, Homo sapiens
tgcagaatgagcccctgccagagaggctggaggaagcagaatctggtaatataagtcaaaagtctgatgaagaagattttgtaaaagttgaagatttac

SEQ ID NO: 880087 - DNA, 98 bp, Homo sapiens
ctggaccttctcaaaggcacagaggcctccacgaagaatatttttggccgatactcttcacagcggatgaagacaggaggtgagactgcatcacgtta

SEQ ID NO: 880088 - DNA, 99 bp, Homo sapiens
gatccgtagggaggacaccgtgacttcccggacgctgggaaatgaaagcatgctctgaattgccatcggatgaagcctgctctgttcagcgtgctctgt

SEQ ID NO: 880089 - DNA, 99 bp, Homo sapiens
agaccaactgccccgccaccgtcatcaacgggcagtttgtcgaacgatgttggactcatagtcactgccagaaaggtgctggagaatctggtaaaagca

SEQ ID NO: 880090 - DNA, 99 bp, Homo sapiens
agcgcgctaaccctttactcgcgacctttcgcttcaccttcacagcagccctgcgaggtactccaaagattcaggtttactcacgtcatccagcagaga

SEQ ID NO: 880091 - DNA, 98 bp, Homo sapiens
taaagcccacagagatctacaaccttggagcccagagccacgtcaaagaaggaaaatcacctcggcagtgtttgaaggaaggatactgcaactctttg

SEQ ID NO: 880092 - DNA, 99 bp, Homo sapiens
ggcactttattatgcaggtggtctgtgaagccacacagtgtccagatacgaggggcaaccttcgcccagaagaggcacttcaggctctcaccatatatg

SEQ ID NO: 880093 - DNA, 99 bp, Homo sapiens
tcgggcaacctgagggagtcttcttatgggcctgagatagacagtcacgactttgtcctcaggtcgacgtgttgatgcccaatgttggtgagattgtgg

SEQ ID NO: 880094 - DNA, 99 bp, Homo sapiens
cttcatttacttcttgtctcttcccagggtagccaggacctgtggaattctcggtcactagaggagtatggcttgatgtctccctctgctctcttgggt

SEQ ID NO: 880095 - DNA, 98 bp, Homo sapiens
aacctgcctgcctgcaaggatggctccgagccgtggccctatgtggtggtgttgtttacattcagagctctatcaataagaggaatacatattacagt

SEQ ID NO: 880096 - DNA, 146 bp, Homo sapiens
tcttcacaggtcatatggggaagctggtacccctgaaggagaccatcaaaggattccagcagattttggcagctgactggaaataccggcatgcaggattgatggccttatctgccattggtgaagggtgccaccagcaaatggaa

SEQ ID NO: 880097 - DNA, 99 bp, Homo sapiens
cggggacagcgacgacgcggaggcagagaagggaacgcccggcccagccccgatatgttcaaggaatgagtgatttactttcccctcttttatatgtga

SEQ ID NO: 880098 - DNA, 99 bp, Homo sapiens
gagcagcctcggcaaggtggcttatcagagggatcatctggtttcttggggtgcgatgctggagtagggtgcatttttgcatctctggaaaacccatct

SEQ ID NO: 880099 - DNA, 98 bp, Homo sapiens
ggtgaatcagtatgttgtgcaagaggtactgtccatcaaacatcttccaccacagcttagaggtggttggttctagctattgccatggtacgttttta

SEQ ID NO: 880100 - DNA, 99 bp, Homo sapiens
gtgagtgatcactctcaatcccggggcgccctgcgtccggcagaggaggcgagcatcccgctcaggtgatgaggaacccctcgcgcacccagcgcagaa

SEQ ID NO: 880101 - DNA, 99 bp, Homo sapiens
gggaaaccaggcatctctgggtgggcaacttacccgagaacgtgcgggaagagaagatcatcgagcatttcaaacggaaacatgccctgaactgtcaca

SEQ ID NO: 880102 - DNA, 99 bp, Homo sapiens
gatccagaacttgcagcaacaataggtatatgtctcgagtccacggtatgcaccctaaagagaccacccgtcagctgagcttagctgtgaaagatggtc

SEQ ID NO: 880103 - DNA, 99 bp, Homo sapiens
caagctcggagcgggagtagacagtggccggcagggcagccgggggacagctgtagtgaagtctccagagaatacagagggcaaagatggatccaaagt

SEQ ID NO: 880104 - DNA, 99 bp, Homo sapiens
tgagctgcgaggaaaatggcggcgggagtgctgcaggtggagaaattttcagcctgtgtttacctgagttggctgaaatggtttctgaaaatgatgtta

SEQ ID NO: 880105 - DNA, 99 bp, Homo sapiens
gggacagtggcggatgtgcactgctacaggactctactatggaggaaggaaaatcacctcggcagtgtttgaaggaaggatactgcaactctttgaagt

SEQ ID NO: 880106 - DNA, 99 bp, Homo sapiens
ctctccttctggactcactctgcctcagcaacactggtccctgttgccccaccaatatgccagaatgaaactagtgatcgagaagatggcctccccaaa

SEQ ID NO: 880107 - DNA, 98 bp, Homo sapiens
ttggcggactttaagggcgttttgcagcgacccagctataagttcttcttcaagtctatggacgacgatttcgggtctgttctcagagcgatgggccg

SEQ ID NO: 880108 - DNA, 99 bp, Homo sapiens
tgggagcagatcgattttaccttggataccctgctttggataacaacgaacttgatgcaagtgataggtttgccaaggtcagacctctcatcatccgga

SEQ ID NO: 880109 - DNA, 99 bp, Homo sapiens
tctgtatttcatgccagagagtttggaaaaataattaacttcaagaccccagaggatgccagggatctcattttgcccaacggtggtactccagcaggt

SEQ ID NO: 880110 - DNA, 98 bp, Homo sapiens
aggcctctcccaaagcacctgcgcagctaaaacagcggaagaggtgatttattatatggttgttacactcggccacaaataaacacagaaatagtcca

SEQ ID NO: 880111 - DNA, 99 bp, Homo sapiens
cagcaatccttggctcactgaggaggtttgactgcttttcaggaagccttggacgctgcaggtgataaacttgtagtagttgacttctcagccacgtgg

SEQ ID NO: 880112 - DNA, 99 bp, Homo sapiens
gactgaaaatttagtgctgtcttcacatactggattttgccaatcttcaggtattgttgcagcatctggcagtgagactgaggatgaggacagcatgga

SEQ ID NO: 880113 - DNA, 98 bp, Homo sapiens
ggatcacaaacactcagagtggaaaaagtaccatcatttgaaacaggtttgaacttgttctggaagctgtgcgtcaccgtaatgaggcttgtaattct

SEQ ID NO: 880114 - DNA, 99 bp, Homo sapiens
aggtgacccatgcattggttaatatcagcttattcagctgattctgaatcatcttacactaccagacctgtgtagattagcacagacttgcaaactact

SEQ ID NO: 880115 - DNA, 99 bp, Homo sapiens
aactcaatgctgctgtgtgggaagaagatttgtaaagaaaactcttaggatcgtagggcatcagaaaaacaaaaagaaatagagagagtaaaagagaag

SEQ ID NO: 880116 - DNA, 99 bp, Homo sapiens
ctacacttgccaaccaaccccacatccctcccggctgtagccaagaactattcggttctctacttccaacagaagggagatgaataagcgtctaacaga

SEQ ID NO: 880117 - DNA, 98 bp, Homo sapiens
agcatgctgtgtctagctcaaggtgagacatggaatccattaaaattgcattatcagttaagaaatgtacgggaacgattagctaaaaacctggtgga

SEQ ID NO: 880118 - DNA, 98 bp, Homo sapiens
gctctcgtctggtttgatcacaagacgggcaagaaaatgttttcagactgctcatttctatgtggaagacagcagttcacctcgagtggtccctaatg

SEQ ID NO: 880119 - DNA, 99 bp, Homo sapiens
tgctgttgtagcacagatttatgtaatgtcaactttactgagaattttccacctcctgacacaacaccactcagaacgtcaaggtcgtgggaaataaaa

SEQ ID NO: 880120 - DNA, 98 bp, Homo sapiens
cgcctctgccaccgcaccaggaagaaagaaagtcgtgctgtatccctactgacttctccagctgctggtataaaaacagttgatcctctgcctttgcg

SEQ ID NO: 880121 - DNA, 98 bp, Homo sapiens
cttattgcatcacagtaattgctgtacgaaggttgaaatcacaaagattagacacctttttagataggtgttcttcagcaccactgacaacacggttc

SEQ ID NO: 880122 - DNA, 99 bp, Homo sapiens
gagtcgagtctagaattcacacagagccacctaggttgctccttgagggcaggacagttcttatggctttatccgttgcgtaagcacagagaggtctgc

SEQ ID NO: 880123 - DNA, 98 bp, Homo sapiens
ctccctgcgactcctggaccaccgggcgctggtctgctcccagccgatggcccactgcgtgaccttggttcagctgtccatttcctgtgaccatctca

SEQ ID NO: 880124 - DNA, 99 bp, Homo sapiens
cgcccatagccggacggggatctgagctggcaggtgagaagatgacagaggaagaagtagagatgctggtggcagggcatgaggacagcaatggttgta

SEQ ID NO: 880125 - DNA, 99 bp, Homo sapiens
cattgtttgtcaccacaaaaaggacaggtgaaaaggtgtttgtatctctctatggagctgccatagacatgaatataaggctggataagaattccttga

SEQ ID NO: 880126 - DNA, 99 bp, Homo sapiens
cccctccacatctgtgggatatctcatcaggacaaattattggattccagcacagtgactcacttattcaagataactgaaaacattggttgtgtgatg

SEQ ID NO: 880127 - DNA, 99 bp, Homo sapiens
ggagacttcaaagcttccatcactgggacagaaagggtgtcctgatggcaaatttcaagggccacgcgcttccagggagtttcttcctgatcattgggc

SEQ ID NO: 880128 - DNA, 98 bp, Homo sapiens
acgtctgttcctccatttcccgcctcagctggatgacggagagggatctccgggattaaagaacaacgaccgcaggtgatttgatgaaggctgctgca

SEQ ID NO: 880129 - DNA, 99 bp, Homo sapiens
cctccttctgccatgggtgcagcctgggaccactcgccatccctgccgtcccaaggctctctctcaacgatggtagggaaagccccgcctcctacaggt

SEQ ID NO: 880130 - DNA, 99 bp, Homo sapiens
tcataacagatgttttccaaaaacttgtagaaggttgtgaaaaaactactaggatcacgcggcatgtattgaggattactttgatattgtgaagagccc

SEQ ID NO: 880131 - DNA, 99 bp, Homo sapiens
gaagatggcgcctgttgtgacaggtgaattttgaagattgcaccggtcgacaaaggacagcctatttttccctcgacacccgattcaaagtgggcacag

SEQ ID NO: 880132 - DNA, 99 bp, Homo sapiens
gggtctgggaaaatcgctgtgatatcagatgcaacaaggagacgcgcctttgccctggtctctcaagcgtatacttcaatcatcgccgatgattttgca

SEQ ID NO: 880133 - DNA, 99 bp, Homo sapiens
attcacattcacgatgtttgtgggctctatacagaaaggcctgtcatttatgatccagttcagacagagattgagagagctaagatttttgcacctctt

SEQ ID NO: 880134 - DNA, 99 bp, Homo sapiens
gaagtttcttctggcaatgaagctgcaattttgagttcactagaacgaacactgctatcattgaaaggaaatttgtacatagattctaggcaaaatctc

SEQ ID NO: 880135 - DNA, 99 bp, Homo sapiens
agacctggtcacctgtctggagcaaataaaagagccctgcaatttgaagatacatgagacagcagccaaacccccagaaatctcctgcaaagaagctga

SEQ ID NO: 880136 - DNA, 99 bp, Homo sapiens
tcttcttggttctgctacaatgaagctgtggtctaccaatctagacaactcagtggcaagcattgaggcaaaggctaatgtgtgctgtgttaaattcag

SEQ ID NO: 880137 - DNA, 99 bp, Homo sapiens
tttcttatgctgggatgtgccttagaggattatggatctcattcgtcggttcggatccaagccagttctgtggtcagcaaggctcccctctgggcaggc

SEQ ID NO: 880138 - DNA, 99 bp, Homo sapiens
ctctgggacacacctccattggatttaaaagacagtcctcgtcagcactgactttcagctatggaatcggagcttactccacgggaacagcctctagat

SEQ ID NO: 880139 - DNA, 99 bp, Homo sapiens
gagtgacaggaaaacaccaccaagcctgatgaaggcattcttggtgttggcaccgtgattgtgttttatgtacagagcaggccgcctttcaaggttctc

SEQ ID NO: 880140 - DNA, 99 bp, Homo sapiens
cacctcccggtaccccggctggagggcgtttctcgggagcagttcatgcagcacctctacccacagaaagttcaggagccctggaaaggagaaggaata

SEQ ID NO: 880141 - DNA, 99 bp, Homo sapiens
ctccatgctcctcgatatcagtctatgagaaggccactgttcaccagtcctacccacaccatgccacacagctccatgcccaccagccgcagccggcta

SEQ ID NO: 880142 - DNA, 99 bp, Homo sapiens
ctgccggaaggggtcccgaagccccctgcaggaactctacaacccaatccaggattatgtatatcacgtagtgagtgcgatctgtgaatggacagtggc

SEQ ID NO: 880143 - DNA, 99 bp, Homo sapiens
cagacactgagagccgctttcatcaagacactctcgaaagcgatgggaacgctttgtccacagtgaaaatcagcaccttgtcagccctgaggccttgga

SEQ ID NO: 880144 - DNA, 99 bp, Homo sapiens
ttcagcacatccagcccgcagcgctcagcatccttgctgaactacagcttcgagaaccaagctttcccgatgttcagcatggtgtactcatccataaag

SEQ ID NO: 880145 - DNA, 99 bp, Homo sapiens
ttcgaccctgcccagcacgaccagctcatgcagccgacaactgccccttcaaactcttccagcctcaccctgtcaggtatcaaagaagacaacagcttg

SEQ ID NO: 880146 - DNA, 99 bp, Homo sapiens
tcctggaatacacccacctaccttgaaccagagacgcctggagacgctcagggcagtcccccagagctaaagcggcccagactcgatgaaaacaaagga

SEQ ID NO: 880147 - DNA, 99 bp, Homo sapiens
ccatgaagagtcctgaccacaatggggaggacaacttcgcccgggacttcatgggcgggaaaggacgcataggagtggtcatatcatcctacatgcatt

SEQ ID NO: 880148 - DNA, 138 bp, Homo sapiens
cgaaatggaagatgggaaagttattgaacggctgggccagagcgtggttgctgaccagttgaaagaagagacggaggatgcaaatgaagaagccccattgagggaccgctcccacatcgagaagaccctcatgctgaa

SEQ ID NO: 880149 - DNA, 98 bp, Homo sapiens
gtcccaagtcgtccccctctccgccccccaggaggggcgagagggagccgcagctgatgtcagggagagcctggggtcagaggccctccaggtccttc

SEQ ID NO: 880150 - DNA, 99 bp, Homo sapiens
cgggtagagattggcttcgggctgagctagcagtgagcaccttttggcccaatgaatatcagtcttccactataggaaatgggaatttaaagatgatca

SEQ ID NO: 880151 - DNA, 99 bp, Homo sapiens
ctgcacgtgcaactgcaaacgctctttgttccagagcatggagatcaccgagaggccccagcaacatgcagctacaattccagagacccctggccctca

SEQ ID NO: 880152 - DNA, 99 bp, Homo sapiens
tatgattttgctgctgaacctggaaataatgaactgacggttaatgaaggagaaatcatcacaatcacaaatccggcttcaacggaccacaccaaaatg

SEQ ID NO: 880153 - DNA, 98 bp, Homo sapiens
tgcttggccagcgacagatcctttgctgctctgtctgccggttcttgagatggttgccaccctggggaccacaacatgctgctcctttgacaatctct

SEQ ID NO: 880154 - DNA, 99 bp, Homo sapiens
ctaccgtgaggatggtgtgaccccatatatgattttctttaaggatggtttagaaatggaaaaatgtgtggacccccaaaagtacaagggcatatttaa

SEQ ID NO: 880155 - DNA, 99 bp, Homo sapiens
agaaccaaccctgccagcacctggaccttggacattcagacttcagaatggctcaaactgtccaggttgctgaagttgaaccacagtcacagccacagc

SEQ ID NO: 880156 - DNA, 99 bp, Homo sapiens
cgcctccgtgatgtacaggaagtggaaagagagcaaggggaaggatcgggagtacacagacatcatccggccaggtcagagcagcccaccatgggatgg

SEQ ID NO: 880157 - DNA, 99 bp, Homo sapiens
ccttgctcaccgatggaggaacgtcgtagacctgccccacaggctccgcaggctggatcggctgcttccaactgaggctccagggtctgggtccccgct

SEQ ID NO: 880158 - DNA, 99 bp, Homo sapiens
cagaccgggcgagcagagtaagaagcaggtacagcagggaagaactggaaactcagagaaagaaactgcccttccatctacaaaagctgagtttacttc

SEQ ID NO: 880159 - DNA, 99 bp, Homo sapiens
ttttacggaccacctggaactggaaaaacatccactattttggcagcagctagagaactctttgggtaaaaatgtctccatcgtatcatcagtccaaag

SEQ ID NO: 880160 - DNA, 99 bp, Homo sapiens
gaagatgggaatcagagtggatcagcttcaggtggtgtgtgagtcaccagtagagattataaagtccaaggaagtagaatcagccttacaaacagtgga

SEQ ID NO: 880161 - DNA, 99 bp, Homo sapiens
ccagcagcccccgaaggccctatcaggacatggagtatgaaagacgattcatgatgttgctatcaaaagttgagaaattgtcagaagaaatcatggaga

SEQ ID NO: 880162 - DNA, 98 bp, Homo sapiens
gcgcactgggaggtggaacgggccgaactgcaggtgcatacattcagagggccacactggtgtgaatactgtgccaactttatgtggggtctcattgc

SEQ ID NO: 880163 - DNA, 98 bp, Homo sapiens
aaagcttgctttcagcatgttaagccttgtatagttctcctgtgcctcctgttggctctctttgcatctggcctcatccaccgagtctgtgtcaccac

SEQ ID NO: 880164 - DNA, 99 bp, Homo sapiens
aatgatttaacaacgttaccagcatccattgcaaaccttattaatctcagggaactggatgtcagcaagaatgacaaggcgcctctgtcgaagagcctt

SEQ ID NO: 880165 - DNA, 99 bp, Homo sapiens
tttgaaggaacagcatcctgacatcgaaaacccggacctcgcttacctgcatgctgatgatagtatttctgctgcaagtacttctgatgttcaagatcg

SEQ ID NO: 880166 - DNA, 98 bp, Homo sapiens
gtcgtccaaatagtatcaggattccaagacatacaacagctgtgccagactctgcttaaaccaagaaacagtatgtttagcaagcactgctatgaaga

SEQ ID NO: 880167 - DNA, 99 bp, Homo sapiens
tgcttgcgcattaaagttttaacaggttgttcttgcagaacatgccagcagaagcattcaccaactgacatgtgccctgaaagaaggcgatgtcactat

SEQ ID NO: 880168 - DNA, 98 bp, Homo sapiens
tttcttcagcatggctcatattctacttcattcagaagatcaggtacacaaatgcacgcgacaggaaccagacaatgcaggaatcacatgaacctgtc

SEQ ID NO: 880169 - DNA, 98 bp, Homo sapiens
acagtcacagaattgagtgatttcctgcaggctatggaacacactgaagttcttcagcttctcagccccccagacaatccatggacacaagggaccaa

SEQ ID NO: 880170 - DNA, 99 bp, Homo sapiens
gaccgatgtggaaactgctgcccgccgcgggcccggcaggagatggtctgtcttctgctgatcccaactctgattggaatgcaccagcagaagagtggg

SEQ ID NO: 880171 - DNA, 99 bp, Homo sapiens
aagccaaaatgggaaaggaaaagactcatatcaacattgtcgtcattggacacgtagattcgggctatctatgtgcctgctgatgacttgactgaccct

SEQ ID NO: 880172 - DNA, 98 bp, Homo sapiens
ttccgttacagttactatgatgaatcccagggggagatttatagatccattgaacatctagataaaatgttgagtggtgattttatgcaatggcttca

SEQ ID NO: 880173 - DNA, 99 bp, Homo sapiens
ctcgtgcaattgttgccattgaaaaccctgctgatgtcagtgttatatcctccaggaatactggccaggccactgcagaacaaattagacttgcacaga

SEQ ID NO: 880174 - DNA, 99 bp, Homo sapiens
agccacaaatgtacccccagtacacttactactatcctcattatctccaaaccaagttccagttcagacatcataagagatcttttagaagaagaggaa

SEQ ID NO: 880175 - DNA, 99 bp, Homo sapiens
cttggtatactacatggcaaaatgggaaaggctgaggccgcggaaggagcagggcacatacgccctgtccctcatctatgggaagacggtgtaccacta

SEQ ID NO: 880176 - DNA, 98 bp, Homo sapiens
tcggaaactttagagaagttaagagaagaattagctatcaaatccggccagtactactataattccttgacccagcagtacctttactgggatgggga

SEQ ID NO: 880177 - DNA, 145 bp, Homo sapiens
cgggagctgcagacagtggcctcctgctgggcactcctgggggaatccctgggattcccccaggagtgcccagcaggaggccactgtctgcagctcccgtgaagatgtccactccagacccacccctgggcggaactcctcggcc

SEQ ID NO: 880178 - DNA, 98 bp, Homo sapiens
ctcacagaggcagaccctgcagccattgctgaacctgtttgcatgagttgctcctgacggccctttaggatacttccatgtctgtagggtctagagtg

SEQ ID NO: 880179 - DNA, 99 bp, Homo sapiens
gggaggaagccctttctcctcggcactgtattctttacctgcttcccaatcccactgatgaggatcagcccatggttctaaatggcttctaagaagttg

SEQ ID NO: 880180 - DNA, 99 bp, Homo sapiens
cagccatcaagcccaagactgaatttcaattggggaaacagtgcttcttagtcctacgtcagcagcagtttaatgtccaggctcttgtggcggtgggag

SEQ ID NO: 880181 - DNA, 99 bp, Homo sapiens
tgtgatgctggccggaatgaatgggtgcagttctgaagccagagttgaaaagggaccctgtcagtacaagagtcaagttaaagattgtcccccatctcc

SEQ ID NO: 880182 - DNA, 99 bp, Homo sapiens
tcgggttctgacaagatggccgggctgccccgcaggatcatcaagtataccaacagatgttttaaagattgtgtattctgtgggtgctcagacaacagc

SEQ ID NO: 880183 - DNA, 99 bp, Homo sapiens
gccctcgtggttcccagcacccgcccggacctccacaccaggctactgtttccccaaacgaacacgatgaggcgagtggtacgacagagcaagtttcgg

SEQ ID NO: 880184 - DNA, 99 bp, Homo sapiens
cctgggcaggctgaaagatggcggcggcgtctgtctctgcggcttctggttctcacttgtcggtccaagacaactttgacaagattgaattcaatagga

SEQ ID NO: 880185 - DNA, 99 bp, Homo sapiens
aaagagtgcccaattccaaatgtacaggaagtgggaaaactcttgcctttgccatcccaatgattcatgcggtgttgcagtggcagaagaggaatgctg

SEQ ID NO: 880186 - DNA, 99 bp, Homo sapiens
gacctgcctccgcctcagtatcggctctgattggagtacaagatcttgctgcacggtttgtggtacgaactgtttggaggaaaccccaacaacttgccc

SEQ ID NO: 880187 - DNA, 99 bp, Homo sapiens
gttctgcttacccgaggccgctgctgtgcggagacccccgggtgaagccaccgtcatcatgtctgaccaggtccacctcattcatttaaccgagatgag

SEQ ID NO: 880188 - DNA, 99 bp, Homo sapiens
agatgtcagttgggcacaaggcccaggagagcaagcactatgttggccatggaaatgctatcaatgagctgaaattccatccaagagatccaaatcttc

SEQ ID NO: 880189 - DNA, 99 bp, Homo sapiens
ccaaaacaaaaagaactgcccacagagaaaatcttgtaaaaactcctccttgcaagcaatgaagtagaagaaaacaatgctgactttcttggcctgctt

SEQ ID NO: 880190 - DNA, 99 bp, Homo sapiens
aaaccgtggctgctcgataaatcagacagaacagttaatcctcaatttaagcctgatctaacccctagaaacagacctcgaagtagggggaaaactgca

SEQ ID NO: 880191 - DNA, 98 bp, Homo sapiens
gtcactaggagtatgccagatggaagaaccattgttagtgaacgtggacaaagctgttgtctcagggagcacagaaagagaactcgatgccaccgcaa

SEQ ID NO: 880192 - DNA, 98 bp, Homo sapiens
agattttgctcattcttggaatgaatcatgggtaaatcgaatggaagaaggaaacccaaggttgtggtatgctgacctgttaccctccaaatcttctg

SEQ ID NO: 880193 - DNA, 99 bp, Homo sapiens
ggtgtccaagagagatgtacgatctcatgaatctgtgctggacatacgaattgtagaaggcatgaaacaaaaaatgtggagtattgaaaatattgcctt

SEQ ID NO: 880194 - DNA, 99 bp, Homo sapiens
ggaaccggctccttgcgtcccgcctccctgggagctccgcacgggaatgtgttccagaagatctagaactgaagaagaagatttttgctcagttagatt

SEQ ID NO: 880195 - DNA, 98 bp, Homo sapiens
cacaaggaatgcaagggccacctgttcctcagttccaaccacagaacatgccagcagaagcattcaccaactgacatgtgccctgaaagaaggcgatg

SEQ ID NO: 880196 - DNA, 99 bp, Homo sapiens
attgcaggagggccagtttccgttacagcactagatgtagttctccttgagtcatctgaatgccgctgctgccgccgtctcagaagccgaaaggtgctg

SEQ ID NO: 880197 - DNA, 99 bp, Homo sapiens
acagctctgcgcggctttttgagcggtcccgcatcaaggctctggcaggaggcaaaaccttcaactgaggacttgggggataagaaggaaggtgaatat

SEQ ID NO: 880198 - DNA, 99 bp, Homo sapiens
tcaaactcccaggctcaagcaatcctaccatgtcagccttcccagtagctggaactacagcctaaaagtggtgatgccaaatcttcgagtaaatcaaag

SEQ ID NO: 880199 - DNA, 99 bp, Homo sapiens
taacaccgttcacagagctagccggacgtcctccgactcaagcacactgggatgagaaattccaccacaagatggtggacaaccgtggcttcatggtga

SEQ ID NO: 880200 - DNA, 98 bp, Homo sapiens
ctttgtgcgctcgcagaccacccaagtctattatgtcctataacggaggggccgtcatggccatgaaggggaagaactgtgtggccatcgctgcagac

SEQ ID NO: 880201 - DNA, 98 bp, Homo sapiens
aaaactactaggatcacgcggcatgtattgagatattgatgatgttaagaagttcaaaccgggttacctggaagctactcttaattggtttagattat

SEQ ID NO: 880202 - DNA, 99 bp, Homo sapiens
cgcagtggtcgcttcttctccttgtcagaagaagaagttgtagaaggagagaaggaagtcgaggctttgaagaaaagtgcggactgggtatcagactgg

SEQ ID NO: 880203 - DNA, 99 bp, Homo sapiens
atgaaatcctgctttcttttcctcagaactactatattcagtggctaaatggctccctgattcatgagccctggaaaccaacaggtataaccatatcac

SEQ ID NO: 880204 - DNA, 99 bp, Homo sapiens
aagaaactgttgaattagacccgtttcctatagatgagaaaccatacaagctgtgtgcctacaccaactaatgttacaattgaatcctataacatgaac

SEQ ID NO: 880205 - DNA, 99 bp, Homo sapiens
gaacatgaagccagtcctgacaatgggcagaacgaattcagtgatatcattaagtccagatctggcatatggctacccattctccccagaaatctcacc

SEQ ID NO: 880206 - DNA, 99 bp, Homo sapiens
acaattctgaaacttcttgatgttgtccatcctgcagcaaagactttggtagacattgccaaatcccaagatgctgagattccaaagtcatgtgttgaa

SEQ ID NO: 880207 - DNA, 99 bp, Homo sapiens
gctttggtggatggggtattcttgaaccaggtcatgctccaaataaaactggtgatttatttgctatcaaagtatttaataacataagcttccttcgtc

SEQ ID NO: 880208 - DNA, 99 bp, Homo sapiens
ccaaggacaaaatgatgagaggctctcgcagaggatgtgttagactcagatttgcttgcctaaactggacttgaagcaatttaaactactggagatctg

SEQ ID NO: 880209 - DNA, 99 bp, Homo sapiens
ctagtaattgagcctcaaaatgaagatggcacatggcccaggcagaccttgcagtcaaaggggaagacgttttcatcccgctaatcttgggaataagag

SEQ ID NO: 880210 - DNA, 99 bp, Homo sapiens
tccagatgctggatgacacccaggaggcatttgaagttccacctggcacctgtgtttgctctgtttgtaccattttactgctccataccaagagtccaa

SEQ ID NO: 880211 - DNA, 125 bp, Homo sapiens
taaaggccaaatacccaagcctaggacaaaagcctggaggctccgacttcctcatgaagagactccagaaagggcttgtacctccttttaaacctcaagtaacatctgagacagatactagatat

SEQ ID NO: 880212 - DNA, 99 bp, Homo sapiens
ttcttaccaagctggttaaaaaaggcgagaagaaaggactgtttgtggagaaaatgcctgctcgaatataccaggttcaaaccttgtactactcagctg

SEQ ID NO: 880213 - DNA, 99 bp, Homo sapiens
agacaacctccctggagtccggtggctcacacttccactggaaatcaagaaaatatttacaccagcagctccagttcataccaataaagaagatcctgc

SEQ ID NO: 880214 - DNA, 99 bp, Homo sapiens
gctgcgtgagcgagagtatcgccttcctctggatcgagaatgtgatctagaccgtgacatctttttctgaccgatgtggaaacatagaagactggctgt

SEQ ID NO: 880215 - DNA, 99 bp, Homo sapiens
gaagcccagtcctctcctgttcttatttgctttatatatcatgtgtgttcctcactcagtgcctacaccaactaatgttacaattgaatcctataacat

SEQ ID NO: 880216 - DNA, 99 bp, Homo sapiens
aacgaccctgacctggtcatggcgtccagctccggcctggcgtgaggaccccccaatccgcgtgagatatgccatctctatggcccgaaaaattggagc

SEQ ID NO: 880217 - DNA, 99 bp, Homo sapiens
caaaattaggattgcaactggacagatagctggcgtggataaagatggaaggggtcaatataaaaaggcgatagccagcctgcatcacttagcagctct

SEQ ID NO: 880218 - DNA, 99 bp, Homo sapiens
tcatcagtgagaaaacggctgcatattggtgtcaaagtgtcactgaactaaaggctgactttccagacaacctgtatgcaggagctattcttgaagttt

SEQ ID NO: 880219 - DNA, 99 bp, Homo sapiens
gatgggttgggcatgacgctgccctcgccatcattcactgtgagggatgttgaacactatgttggcttcaggcagtgatgtgtatcatcagtactatca

SEQ ID NO: 880220 - DNA, 99 bp, Homo sapiens
tttgagcacgtgcaggagttctgggagcaccgcatggactcgaacgtgctttttctcaagtatgaagacatgcatcggccacagctgttgcaaatccaa

SEQ ID NO: 880221 - DNA, 99 bp, Homo sapiens
aggaattgagagtcacagaggaaggacagtggagtctggcatcttattggtgaaattgatcttcaaattctctccaaagttcaggctcaatacccagga

SEQ ID NO: 880222 - DNA, 99 bp, Homo sapiens
ttggaaggatgcacaagttccaaggttacgtttcagaaatctactttcttcaatgtgttaaccaatagtcaggcttcagcagaaaacttcccgttctgc

SEQ ID NO: 880223 - DNA, 99 bp, Homo sapiens
cctgggtgacagagccagaccctgtcttttcttcaaaaaatctgctttccagtcttctaagagtctcctgatgtatccgctctgtgtttcttaaattct

SEQ ID NO: 880224 - DNA, 99 bp, Homo sapiens
ctctccagacactgggtctgactatttctgaacaacaagcagagttgattcttcaaagatgcctgaaatgtgcagatgccccgtgtcagaagagctgtc

SEQ ID NO: 880225 - DNA, 98 bp, Homo sapiens
ggccgggcaattcccgaccgaaccaaacggcaggcagtggttaaaggttcccttccacatccttttgccttgacgttatttgaggacatattgtactg

SEQ ID NO: 880226 - DNA, 99 bp, Homo sapiens
aaaagaaacatgttggaagatcaaaggcacaggtgattgcatactcggaacatcgttaccgtatctttggggaaaccatcgatattgcagtgggtaatt

SEQ ID NO: 880227 - DNA, 103 bp, Homo sapiens
tctacctgaacgtggagtccgtctgcacacaccgggagaggtcagagctcccagacaacaaggtcctcaatgtgcctgtggctgtcattgcagggaaccgacc

SEQ ID NO: 880228 - DNA, 99 bp, Homo sapiens
ttgcttcctgccattgtccacatcaatcatcagccattcctagagagaggcgatgggcctattaattggcagagggggtcgatttgggaggaaaggtgt

SEQ ID NO: 880229 - DNA, 98 bp, Homo sapiens
ggacccagcagacatgaacgctctcgctctgggtccctcagaatatgactctctgcctgaaaatagcgagacagatcactttgggaagcagtgacatc

SEQ ID NO: 880230 - DNA, 99 bp, Homo sapiens
gacggctcacctgtgcgggatggaacaaaagatttgagttctgtgaacctgcatttgttgttggtaattgcctccagatagcttctgacagtcatcagt

SEQ ID NO: 880231 - DNA, 99 bp, Homo sapiens
caggcctcaggccccctcaccatcctagaggtcaagatcagctctggctaggtaatctgtaagtcagatgctccaacaggggatgttcttcttgatgaa

SEQ ID NO: 880232 - DNA, 99 bp, Homo sapiens
cctggcatcgtggcatttccgagattggagcctaacagtgtagatcctgagaacatcaccgaaatccggcgcgacctggagattgagcgaccaatgccg

SEQ ID NO: 880233 - DNA, 99 bp, Homo sapiens
gatctctcatctaaagaagaagttggaaaatgaggtggaacaaaggcatacacttactagaaatctagatggtgctgttggcccaaaggttgccctgaa

SEQ ID NO: 880234 - DNA, 100 bp, Homo sapiens
aagtccagagcgtctcttgctgaaaaaggtgatccttcactagagaactggaagaatcctcttcatttgcctgcaaacaggcagtcctcagctctggact

SEQ ID NO: 880235 - DNA, 99 bp, Homo sapiens
caagatggcggaagcggaggagtctccaggagacccggggacagcatcgcccaggcccctggttcaggtgtgggacacagcaggtcaggaacgtttccg

SEQ ID NO: 880236 - DNA, 99 bp, Homo sapiens
ctctggttcacagaggtaacggagcttgcccgaggccagggctgccggtcacttgctgcagggcacccgggatatatcagccatgataaagagacctcc

SEQ ID NO: 880237 - DNA, 99 bp, Homo sapiens
ggccatagtaccgaaggggaggaaggccaaagccttatatgatttccgaggggagaatgaagatgaactttccttcaagtagagacgaggtttcaccat

SEQ ID NO: 880238 - DNA, 99 bp, Homo sapiens
ttcttcccctcagccattgagagggtgtcagaggcaatcgtcagcatccgaagaatccaggctttgcttcacctctgggtcatgattgttctgttgact

SEQ ID NO: 880239 - DNA, 99 bp, Homo sapiens
cgaataagaatttccggagcgtgtctgccaacaccagccctgcatcttggatcctggcagtgcgggtgtcggctcctgggaggtggaggttgcagtgag

SEQ ID NO: 880240 - DNA, 98 bp, Homo sapiens
gcagtatgaccgggtttctttgatgcgacctcaggaaggagatgagaaattccgggtagatatgcctggctcaggcagtgcattcatccccaccatca

SEQ ID NO: 880241 - DNA, 99 bp, Homo sapiens
gcaaatactccacaactttcttcatggtgacgtttgcagccctttacagcactcacaaagaaactgttttggctgggcctacttcacctataccttctc

SEQ ID NO: 880242 - DNA, 99 bp, Homo sapiens
gtatttggcaggctttataatttcgttgttttgcattttccactgtatttctcctggccgctagctatcctgttgggacattctgaataagaggttagt

SEQ ID NO: 880243 - DNA, 99 bp, Homo sapiens
caaacagcaagcactgacaagcagcacattctcaagagcacacagctcccacatgtgtttgtgaattgtgttgaatgctttacattgaggctgcttttg

SEQ ID NO: 880244 - DNA, 99 bp, Homo sapiens
gagcgggcagaggatgcagtggaggccatcaggggccttgataacacagagtttcaagtattctaccttgtaaatactgttatttgtatatactgtaaa

SEQ ID NO: 880245 - DNA, 98 bp, Homo sapiens
tttgtcaggaaatctgcaagcccggaagtttcagaaggtagtaaacctattgatggcaattttgctgactgtggaagtgactcatccaaactccatgc

SEQ ID NO: 880246 - DNA, 99 bp, Homo sapiens
ttccaagcaaggaagtcgacagttacttcacggaaaccaagggaagatgaaaaagatggccaggcatataagtttgtgtcacgatctgagatggaagca

SEQ ID NO: 880247 - DNA, 99 bp, Homo sapiens
tgtttggttatattatttgtggtgtacttctgggaccttcaggactaaatagtattaaggatgctcgtcagaagttccgctctgttctggttgaagcaa

SEQ ID NO: 880248 - DNA, 99 bp, Homo sapiens
gaagaacattctcgaatacctagaatggggtgacttgcttttggagggcttcaacaactacaccttcctctccaatggctttgtgcccatcccagcagc

SEQ ID NO: 880249 - DNA, 99 bp, Homo sapiens
gtcctccacggcgctcaggactttggactgctcagcctttttaatccaggcttgggcaccagtattggccaactgttcttgtgtcaaaacctgtactcc

SEQ ID NO: 880250 - DNA, 99 bp, Homo sapiens
tatcagtgtgtcatctccaatcactttggttcatcctactctgtcaaagccaagcttacagtaaatatctcttgcatggcaccaagaatgttaccaatt

SEQ ID NO: 880251 - DNA, 99 bp, Homo sapiens
ggaattccagttcatgctgcccacatctcatccaaacagagtctctctgagaaatcaaggaaagtattccgaatatttcggcagtgggaatctctgtgc

SEQ ID NO: 880252 - DNA, 99 bp, Homo sapiens
gatcttctgcagcaaatggaagaagggctgaagacagctgatccccatgactgctctgcttatactggctggacagatctgccgacaccccaggccatc

SEQ ID NO: 880253 - DNA, 98 bp, Homo sapiens
ttcaaactacgttaagatgacgacagactcagatccaagtcaacagtatattaataaggcagcggaaagaagaaatatgaatacggctccatcaagac

SEQ ID NO: 880254 - DNA, 99 bp, Homo sapiens
acaaaccaagatagaatatggagcagtagaggatggtgcaaccatgacttttttcaaggcaatgctggacgtggctgcaaaccagggctggctggtgac

SEQ ID NO: 880255 - DNA, 99 bp, Homo sapiens
ttggaaataagcaaagaaaccaaagacaaacgattagaagatggctatttcagaataggaacaggaaatatagtggtcattatgattagctatccaaaa

SEQ ID NO: 880256 - DNA, 98 bp, Homo sapiens
tttgctcttgaaatgaagaataaggaacatgaaattgaagtcattgaccaggttttcctttggaatatggataaatacaccatgatacggaaactaga

SEQ ID NO: 880257 - DNA, 99 bp, Homo sapiens
ggggctcgcaactcggcagcctccacccaccggcccaccctacatttagcgcatcatgtgatccggggagttctgtccaacatctcttccatcaccgat

SEQ ID NO: 880258 - DNA, 123 bp, Homo sapiens
ctgacatcactccagcagaagaaagggaaggacaagcatagcgttatttgaactgggatcatgctgagagctattctcataggcagttacaatcgcacgcagtaatgcagcgtgttccttccc

SEQ ID NO: 880259 - DNA, 99 bp, Homo sapiens
ccagcaagaggatggggccctggatgagggggaagggcctcaaagccagaagccaaaattgcctggaaaagagcagtgagaggagtccgggagatgtgt

SEQ ID NO: 880260 - DNA, 98 bp, Homo sapiens
ggacgactgtctccccgcgtaccgccacctcttctgcccggacctgctgcggaccgtgtttcttcgcctcgcctccctggtggtcctgctcttctctc

SEQ ID NO: 880261 - DNA, 98 bp, Homo sapiens
tttgtctatcttcttccttaggaaaccagatgcgaagtacaaaactgcttcggctcattgacttagatttttcatttactttctctctcttggatcta

SEQ ID NO: 880262 - DNA, 99 bp, Homo sapiens
caaggcagacagcggcgccttcctgctgctcttcctgctcgtgctcactgtcaccgagccgctgcggccaggtgaaaatgaaatccttgcaactctgca

SEQ ID NO: 880263 - DNA, 99 bp, Homo sapiens
gaaaactccaccgtagcccttgccaaaggttccagcaacagatagaaatgctttaagttcactctggggaaagctggcctctgaaatcttaatgcagaa

SEQ ID NO: 880264 - DNA, 99 bp, Homo sapiens
tgagcatgacagaacacgccttgggtggaatctatggggttggcaaagccgccctgcatcccccagccctggccgtcctcagccacaccccagatggag

SEQ ID NO: 880265 - DNA, 99 bp, Homo sapiens
catggtcagtgccatttcgcctttatcgtggtggagtccaccctggctgtggagtatggatgtgtccaacagccaaaaactcaagaaagtaaattgaaa

SEQ ID NO: 880266 - DNA, 99 bp, Homo sapiens
tacagctgttgtcctggtatctgcaggtgctgttggcagcagcggtctgcacaaaagcaggaaaggctattgtttctcgacagtttgtggaaatgaccc

SEQ ID NO: 880267 - DNA, 99 bp, Homo sapiens
gacctccgcatcctggacagcgcgcccaccggaactgcaagcacatgttgaccagataactgaaatggcagcagtaatgaggaaagccattgaaattga

SEQ ID NO: 880268 - DNA, 99 bp, Homo sapiens
caaatcatttgtagccataaacctccatgacaatgataaaagccagcttggctgcaatcacatgccaatagtagatgttgtgtttatactcctgggggt

SEQ ID NO: 880269 - DNA, 99 bp, Homo sapiens
caggcgtgcgcggacggtgtgcggccatgtacatcttcatgtgatcagccaggattttgattctccttgccttaaaaacaaaaaacattggaattcttt

SEQ ID NO: 880270 - DNA, 99 bp, Homo sapiens
tccgagtgcagaacctgcaaggtgattgtagagaaggctccaaaagccagggtgcctgatctggacaagaggaagtacctagtgccctctgaccttact

SEQ ID NO: 880271 - DNA, 99 bp, Homo sapiens
aacaattcttcgacatactctccagcttcaagttccctctcccagcctgtgctgactcagccatcttcccattctgcatcttctggagcatcagtcaga

SEQ ID NO: 880272 - DNA, 98 bp, Homo sapiens
acctcggggttctctcctgcccccaagctggttttgctgctgcagcccattgagagtgacgacatggagcacaagaccctgaagatcaccgactttgg

SEQ ID NO: 880273 - DNA, 99 bp, Homo sapiens
ctatgaggatgacaaactctggagtaattggagccaagaaatgagtataggagctgctgttttgaggattcctattctgtatggggaagttgaaaagct

SEQ ID NO: 880274 - DNA, 98 bp, Homo sapiens
taaggccgcgttggggtgagaccctcacttcatccgggtgctctggaacagggctcaaattctcagctgatggctgttcaatacacagaaaccactag

SEQ ID NO: 880275 - DNA, 99 bp, Homo sapiens
aaatcctaatgacagtctccaaattcgcctccatctgtaccatggtgggaccagggagattggatctgctctcaccaggatgtgcatgaggcacagaag

SEQ ID NO: 880276 - DNA, 98 bp, Homo sapiens
gtatgtgcatctcagctcctgatggtttccaccaccaccattactttctctatgtcaagatacctgggaagccggatttggcaatgtggaggctcctt

SEQ ID NO: 880277 - DNA, 99 bp, Homo sapiens
ttcaaatatttcattactgttctgttcttttaaaaatccacataggaactcattgaaagccattattcttagattgtcttccagggtctcctcatccga

SEQ ID NO: 880278 - DNA, 99 bp, Homo sapiens
gcctccctgaaccactccactgcctttaaccctcagcctcagagtcagatgcaggaatttcagaggcaggaaagtgtccggtcccagcataaaggtatc

SEQ ID NO: 880279 - DNA, 99 bp, Homo sapiens
ttatgagtgggaaccatttgcagaagcttgccacagctaccttggatggtaaactccagctctttctagctgagtaaccactgacctgtgagctgggtc

SEQ ID NO: 880280 - DNA, 99 bp, Homo sapiens
gatggcagttcctgatctatgtgagctgcggtgcaaccctgggcagtttgcgtgtcgcagcggcaccatccagtgcatccccctcccctggcagtgtga

SEQ ID NO: 880281 - DNA, 99 bp, Homo sapiens
aaccttcctaagcacctggatgttgagatgctagatcaaccactacccacgggtcaggagcatctttccttgaagaagtacattattgacattgtggtt

SEQ ID NO: 880282 - DNA, 99 bp, Homo sapiens
gcccgccacagtctaaactacatacaggaaattggaaatggctggtttggaaaggcctctgtctcttgctgcaagcagagaaacaacgtctgtactcga

SEQ ID NO: 880283 - DNA, 99 bp, Homo sapiens
tattggaggcctacttgcagcatattacctatcaggagaggagcttgttctaaagacgaaggggaactccctagtgctacaggctgtttcaggaagcca

SEQ ID NO: 880284 - DNA, 99 bp, Homo sapiens
cagccttccgagtagctgggattacagctcctgaagatctgtataaggacttcctgaccttggagcatctcatctgttacagcttccaagtggctaagg

SEQ ID NO: 880285 - DNA, 99 bp, Homo sapiens
aagagactcttcatttagattggattctgaatatcagcctggagcattggtaagcgtcacactgccaaagtgagagctgctggagaactcataatccca

SEQ ID NO: 880286 - DNA, 98 bp, Homo sapiens
atttttagaactccacatttgagggaaggatggagacgctgaaggataagaccctgcaggagctggaggagttgcagaatgactcggaggcgattgac

SEQ ID NO: 880287 - DNA, 99 bp, Homo sapiens
ttttcgaaagctgggtttcccgggagatcccaggcggtgacagagtggagccatggctagaggtgaaatgacaatggatgctctgttggctcgattgaa

SEQ ID NO: 880288 - DNA, 99 bp, Homo sapiens
gatccctgggcctccatcagagagccctggcatgctgactaagctccagtactaaggctcgtacgtctgcatcgattatcttacgtggggcaaatgatt

SEQ ID NO: 880289 - DNA, 98 bp, Homo sapiens
tgcatttcaaatcttcagccaaggaaggttccaacggtccacatatagcctcagttacattagctgcttatgaatgcaattcagttaattttcccgaa

SEQ ID NO: 880290 - DNA, 99 bp, Homo sapiens
gctcgccaccttgtggagcagcggagaggcagccccatggagcctgtccactatgtcctggtgccttttcatgacccagtagagacggagtttcaccgt

SEQ ID NO: 880291 - DNA, 99 bp, Homo sapiens
agaagacgcctagtacaccacgaagggtcacacaaggagtaagtccatgagtgatgtcagcgcagaagatgttcaaaacttgcgtcagctgcgttacga

SEQ ID NO: 880292 - DNA, 99 bp, Homo sapiens
ctttaggtaagaaaacctgaaagtaaattctttctgtcttattctccttagtagtcagcttcaattgctccagttcctctctatgtttctgttccattt

SEQ ID NO: 880293 - DNA, 99 bp, Homo sapiens
tcaccaaattgcagtctgtacaggctttaacagaaattcaggagttcatcagctttataagcaaacaagcatggcttctcgctgtttctgggatgctga

SEQ ID NO: 880294 - DNA, 99 bp, Homo sapiens
ccccaacattacagaccggtggatcctgtccttcatgcagtctctcattggcttctttgagactgaaatggcagatcaatctcagcgaggtagcctctt

SEQ ID NO: 880295 - DNA, 99 bp, Homo sapiens
cacagttcctaccttatgagctcggttttcttatgcttataagagtggaacagatgatgttgaatttgaagtatcatcggaccgacggactgggaaacc

SEQ ID NO: 880296 - DNA, 98 bp, Homo sapiens
gcaattgctcctgctgtaaggagtgcatgctgtgtcttggggccctttgggacgagtgctgtgactgtgttggtctgtagcatctctgtctgttggag

SEQ ID NO: 880297 - DNA, 98 bp, Homo sapiens
gttgattgaagctttcaaacaggggatggggaaagtgcagataacatactctccattgttaaacaaagaacaggatcttttggggatcgtcctgcaag

SEQ ID NO: 880298 - DNA, 99 bp, Homo sapiens
gctgtggggtttctcagataactgggcccctgcgctcaggaggccttcaccctctgctctggcctcttcggtgatctttggtctgaagggctatgtggc

SEQ ID NO: 880299 - DNA, 75 bp, Homo sapiens
tagaagtgatcacttaacagttgtgaatgcgtttgagtgaatattacttcagtgtagaaaatttggaacgagact

SEQ ID NO: 880300 - DNA, 99 bp, Homo sapiens
taagtgtctgagactgacatcggaaccagagggggactggttttgtcctgaatgtgaggtcaatgagctgaaggagaaaggcaacaaggccctgagcgt

SEQ ID NO: 880301 - DNA, 99 bp, Homo sapiens
atcgtgaggttcagctgatgaagcttctgaaccatccacacatcataaagctttaccaggcctgtttaaagaagaaaacccgtatgctagatttgaaaa

SEQ ID NO: 880302 - DNA, 99 bp, Homo sapiens
tctgagtgtctgtccccagagcctcagtttgtgcaggacaccgacatggaacagggactcactggggcacacacaagaccgccaagcattaagattctc

SEQ ID NO: 880303 - DNA, 98 bp, Homo sapiens
ctgaactgggtgctttatatagggttggtgttcgaggaagagacattgttgttcttggtgtggagaagaagtcagtggccaaactgcaggatgaaaga

SEQ ID NO: 880304 - DNA, 99 bp, Homo sapiens
atagaatgaagaccacaataaaagagacctctacttagctcagcaattcttaccttccacagaccccgcacctggaggaggacttgaaggaggtgctgc

SEQ ID NO: 880305 - DNA, 98 bp, Homo sapiens
cggcccgcgcaggaggcgctcctccttcccaccgaatgtttcatccatttgtggaccaaaagatggagttggtttttatttttaaaaagataatgtta

SEQ ID NO: 880306 - DNA, 98 bp, Homo sapiens
ctgtttacagtgtggcccggagcgtcttggctgccgccctgctccacgcagtctgcttcagtgcagtgaagttttaagcagggtctgaaaacccttgg

SEQ ID NO: 880307 - DNA, 99 bp, Homo sapiens
tttctataattggcctgatgaatcctttgatgaaatggacagtacactagctgttcaacaggtgtttggagaagagggattgaccctgaatcttgaaga

SEQ ID NO: 880308 - DNA, 99 bp, Homo sapiens
ctgttaccaaataatgaattggtgagaaagcttggaaatgattcttctgctatacctcgaaaatcttccatctcactgccagcagaagatccatttaat

SEQ ID NO: 880309 - DNA, 99 bp, Homo sapiens
ggagatggggagcgtcctggggctgtgctccatggcgagctgggtttatcaggtagaagatgtgtgtgaagaagaaatgccagaagagtcagatgaatg

SEQ ID NO: 880310 - DNA, 99 bp, Homo sapiens
cctgaacctccagccaggggcgccccgggagcagccagcccgtgggcgagccgcccgcccgccgagcagccatgagagtttcactctgtcgcccaggct

SEQ ID NO: 880311 - DNA, 99 bp, Homo sapiens
aggaactgcgcaaggaggaggagacgctgctgcggttgaaggcagccctgcacgaccagctgaaccgcctcaagcttatgtttattcagagccaaggcc

SEQ ID NO: 880312 - DNA, 98 bp, Homo sapiens
ccgtcgccgcagcagccatggccgagcgccgcgccttcgcccagaagatcagcagtttgtgatggacgcctctgaccccacccagctctctgcatcct

SEQ ID NO: 880313 - DNA, 99 bp, Homo sapiens
ctagtgatggaaccagaatagaaagggatgatgcaagtacgtttactgttggccagtcagtgctgaaagatgtaagcaaagtgaagaagctgaagcaat

SEQ ID NO: 880314 - DNA, 98 bp, Homo sapiens
gagcgcgtgcagcaggctgtggcgcggcggccgcgggtggtataagttgaaatccaaaccaggaaagaaggacaaggagcgaggagaaattgaggttg

SEQ ID NO: 880315 - DNA, 99 bp, Homo sapiens
gatgaaatgagctaataaacacagtcttcagccctacattaggaaactttgatccaaaagccatgaataatttttatgacaacatagaacctggcccag

SEQ ID NO: 880316 - DNA, 99 bp, Homo sapiens
aggagagctgctaaaaattactgcggtgaacagaaacttgaggagaggctggagttctggatggagaaatacgataaggacacagaaatgaaacagaat

SEQ ID NO: 880317 - DNA, 99 bp, Homo sapiens
ccagagcagctattcttcttatggccagagccagaacattgattatggaagattcccacaagagtaccacgtcagagacagcacctcaacctggttcag

SEQ ID NO: 880318 - DNA, 99 bp, Homo sapiens
gttgtgcactgctcgacctgagagacccatggcattcctcagggaatactttgagaggttggagaaggtaattagtatttacatggggatcacagttaa

SEQ ID NO: 880319 - DNA, 99 bp, Homo sapiens
gtaaacgataatcggtttctggtggggtgtcttcttgggccaacttaaccaaccttgcatattccaacttaattgcctcataaacagactgccgtgcag

SEQ ID NO: 880320 - DNA, 99 bp, Homo sapiens
gtgagttaactgggtcatcaaacccttttgttacatccatagatgttgttcttggtattacaaaggctaaagaacgtgccaatggaatggagcttgatg

SEQ ID NO: 880321 - DNA, 119 bp, Homo sapiens
aagagctgttaccttgggtagtacctaataatctagtccaatagagcaaccatgccatctggattcatgttttcaccaataaagaactcctcttgtgcaatgccctgattattaggtac

SEQ ID NO: 880322 - DNA, 98 bp, Homo sapiens
taattatgtttttaatatccggcattatgaaatatctcagcaggacattaaagtgtcaatgtgtgcggataagtcattgaagactctccggaattcag

SEQ ID NO: 880323 - DNA, 99 bp, Homo sapiens
ctagtgatcctgagtacaacacggtggcaagcaagtttaatcagacctgctcacacttcagaatagagaagaggtcggaaaggtctgcttggaagccag

SEQ ID NO: 880324 - DNA, 99 bp, Homo sapiens
ctgtcaacaactctcatttcctttcttatcttcaatgaccactcattgacatctttttctgaccgatgtggaaacatagaagactggctgtagtacatg

SEQ ID NO: 880325 - DNA, 99 bp, Homo sapiens
gtcaacgccgtatccagcgactacgcggccgcggagacctacctgcggcgtcggcagctgctgctccgaggaattggattatgaacgcattcataaaaa

SEQ ID NO: 880326 - DNA, 99 bp, Homo sapiens
tcaggggccatggcgaagcacgagcagatcctggtcctcgatccgcccacagacctcaaattcaaagagtgactcctctttcttcccagagtgtggtga

SEQ ID NO: 880327 - DNA, 98 bp, Homo sapiens
gggctgttcttttgctgcaaatgaagttgatggaattacactgtgatacgactgacttgtaaggagaggatgaggcccgtgaaaaaggcactgaaaca

SEQ ID NO: 880328 - DNA, 99 bp, Homo sapiens
ctgagatcccaggaggatggccacatccccccgggctacatctcacagatttctacctggacaaggactggtactatacccacagataggagacaaatt

SEQ ID NO: 880329 - DNA, 99 bp, Homo sapiens
ggagagaacagggcagttatccattatagggatgatgagaccatatgacatgaagaatgcttacaagctgcatactttggatacttgtctaaaacttga

SEQ ID NO: 880330 - DNA, 99 bp, Homo sapiens
tggagtaattggagccaagaaatgagtataggaacagccccgagtggggctcacacagagccctggaccttcgtggttgtgaaggacccagacgtgaag

SEQ ID NO: 880331 - DNA, 99 bp, Homo sapiens
gaagacaccaagaagagcaaagaaaaggagccagggtggctcttcctcagaattcatcccacaggcatttggaatgcccttatcccaagtcattgcgaa

SEQ ID NO: 880332 - DNA, 99 bp, Homo sapiens
agatgtactgtgcttggctggaaaaccccaaaagtgtacataaggtatgcctggactgttgcccagtgtaagatctgtgcaagccatattggatggaag

SEQ ID NO: 880333 - DNA, 99 bp, Homo sapiens
catggagatggaaaaggagttcgagcagatcgacaagtccgggagctgggcggccatttaccaggtatattcgaattgttgggactcacaacacagtga

SEQ ID NO: 880334 - DNA, 99 bp, Homo sapiens
tgaagagccctcccaaaggatttgatacgactgccataaacaaaagctattacaatgtgaatatgcttttaaggctattaaccagggtggccttacatc

SEQ ID NO: 880335 - DNA, 99 bp, Homo sapiens
ggcccgaggcagaggaacagggaagatggcggctgtggtggagaatgtagtgaagctgcccgccaagctgccccctgtgtgctattctttgatgagctg

SEQ ID NO: 880336 - DNA, 99 bp, Homo sapiens
cccaaagtgctgggattacaagcatcctgccccaggaggaggactatggctttgacatcgaggagaagaacaaggctgtggtggtgaagtccgtccaga

SEQ ID NO: 880337 - DNA, 99 bp, Homo sapiens
ctttaagcaagccagtggaactcttaagactagatttaatgactccgtatttgaacacctctaacagagaagtaaaggcgcagtggctcacgcctgtaa

SEQ ID NO: 880338 - DNA, 99 bp, Homo sapiens
cgcatagacgcctgcccattcggcccggcagtgtgtgaggcgcctttcaaaccggagggattggcaagtgtgcaccaagggtcaggtagtaagtggcca

SEQ ID NO: 880339 - DNA, 99 bp, Homo sapiens
atgtcagctcttccgcagtgattgaagctttgataaatgaaatcttcctaagtataggtgtgatgaatgcagactctgctaccattttggctgtttgga

SEQ ID NO: 880340 - DNA, 99 bp, Homo sapiens
ctgactgaatggctccaattatcaggatttgaaaacccagtatcagaatctaccactttgttactctgtgcaaaaaacctggtgaaaaaggattttttc

SEQ ID NO: 880341 - DNA, 99 bp, Homo sapiens
tgatccatggacccgatgaacatagacacagaaagaagacatagctcatccagcaagccgcctttggccgttcctcccacttcagtattttccttcttc

SEQ ID NO: 880342 - DNA, 99 bp, Homo sapiens
actgcgggaagcaagcggtcttcttcttcacgcaaggtgttggaactcgccataaggcattgatcaggattatggtttcccgttctgaaattgacatga

SEQ ID NO: 880343 - DNA, 98 bp, Homo sapiens
cggcggcagcggcggcgcggaggcggctgaggtgcgagccgataatctggagctttcaaaatgtttgccaaagcaaccaggaattttcttagagaagt

SEQ ID NO: 880344 - DNA, 99 bp, Homo sapiens
tacgggatcctttctggaatggaggtcttatgagctgctattgaacacggcaggaactgtggaaggtgcatcagtgaagaaatggaccaatgtgtataa

SEQ ID NO: 880345 - DNA, 98 bp, Homo sapiens
ttcttcaagagaaatggagcccttctccaaggcctactctgtgtatgatgaagacattgggtactgtcaagggcagtcttttcttgctgctgtattac

SEQ ID NO: 880346 - DNA, 99 bp, Homo sapiens
gccacaaaaaatggacttgactatgcactcagcacaagcagcaggagacccagaatatctagagcagccatcaagaagtgatttctcaaagcacttgaa

SEQ ID NO: 880347 - DNA, 99 bp, Homo sapiens
ccatttcacgcatctggcgttccagggactcattctggtcagggttgtgcaccagggggcagttgtcacagtgatcccccacaccgtcaccatccgtgt

SEQ ID NO: 880348 - DNA, 99 bp, Homo sapiens
gcctcccaagtagctgggattacagacgaggagttgtttttggtctctggagtgcctgtgcttcggtgggcaacattttgggagcgtgcctagcttctt

SEQ ID NO: 880349 - DNA, 98 bp, Homo sapiens
atgaagccagtcctgacaatgggcagaacgaattcagtgatatcattaagtccagatctgacagtgagaccgtgcactaccactatggccctaaggac

SEQ ID NO: 880350 - DNA, 99 bp, Homo sapiens
cagcatttgccatcttcaagtttgttcaggctcttcctggtcagcagcactgctatttcctcaacaaggatgctcctcttccagatggccgaagtctac

SEQ ID NO: 880351 - DNA, 99 bp, Homo sapiens
ttccagcctgatgctaccaaaggtggaaagtcctgaagaaatccagtgggtccagctgcagctgctgacagccattgtgaaactctttctaaagaagcc

SEQ ID NO: 880352 - DNA, 99 bp, Homo sapiens
taaatgtgtagaactgttaatgctgcctccatttgtcattgtataatgagttcctggaatttgaagctcatcttcaataaatcgaacatagttttgtgc

SEQ ID NO: 880353 - DNA, 99 bp, Homo sapiens
cgcatgaaatggaagagagggtggtgcggatagcttgaggaaggccactactacgtgcccctcctgagagcggaagagacttcttctccagtcatcggg

SEQ ID NO: 880354 - DNA, 99 bp, Homo sapiens
tggagttgtacttaaatgcagacacaaggtcctgttattgccttggagtttaatggggatggtgctgtagaagtatgtcaacttattgtaaacgagata

SEQ ID NO: 880355 - DNA, 99 bp, Homo sapiens
atgcaggaacactatgatgagttttttgagggtcagcagttcccagcgctcctcacggatccctctctctcgggccagggtggagcaggctcgccgcaa

SEQ ID NO: 880356 - DNA, 99 bp, Homo sapiens
aaagaggaggaaggagggacttcttggcttctcccagcatagccccaggagttccaccatcttcctctgaagacgtagccatcttgctccatgaaggtc

SEQ ID NO: 880357 - DNA, 99 bp, Homo sapiens
tttgtgccagctctccagagagaaaagatgatgggaagctgtccttggaggaattccagctcttctttgcagatggcgtccttaatgagaaagaactgg

SEQ ID NO: 880358 - DNA, 98 bp, Homo sapiens
aagaagtttctaggaaaggccggacaccaggggaatcccggaggcaagacacttgaggagaggcgctccagcctggacgctgagattgactccttgac

SEQ ID NO: 880359 - DNA, 99 bp, Homo sapiens
cccaaagtgctggaattacaggttgaaaaagatcatctagcaaagccttttttcccagctacatataaggaatttgaaagtcacataaaatggttaaga

SEQ ID NO: 880360 - DNA, 99 bp, Homo sapiens
gatcagctgaccattgacaatcagccatgtcatccaggcctcttgaaagtccacctccttacaggcctgatgaattgctggagtgcagtggcacaatct

SEQ ID NO: 880361 - DNA, 100 bp, Homo sapiens
aaatgtttcctaaagttcgtgaatctcaacttgggctttgttatgcacctaaagccatattggaagctccagaagaaagagcaccccccggaagtcagca

SEQ ID NO: 880362 - DNA, 99 bp, Homo sapiens
gtagaacatatgctctattgccttatgtacacttttggggttttccagccaagcacagtacatctcctccacatagttcgaactagtcccactgagaaa

SEQ ID NO: 880363 - DNA, 99 bp, Homo sapiens
ttctctaccctggaagaagcagatcccttcattaacaggagaaatgcaaataccttcatatcccctcagcagagatggagagctaaagtccaagagagg

SEQ ID NO: 880364 - DNA, 99 bp, Homo sapiens
cgtttggtttaaagaattaaaaggaagaacaacttaagagcttcttcaaaggggttggccggagacctacgacatgaatacctcggagcccaagacgga

SEQ ID NO: 880365 - DNA, 99 bp, Homo sapiens
cgactagccactgtggaagagaggaagaaaatagttgcatcgtcacatgatcgcctcaggcatggcgtacgtggagcggatgaactacgtccaccggga

SEQ ID NO: 880366 - DNA, 99 bp, Homo sapiens
cggaattcgattccactttctcaagttaaccaaagcgctggtgtttgttgagggtgtacagcaggtagtcagccatggtctcctccccgaccaggtggt

SEQ ID NO: 880367 - DNA, 99 bp, Homo sapiens
aggaactattttgttcgtgataaactggatcctgatatggctctttgccgaaatgctagagaaatggttttcctttggaatatggataaatacaccatg

SEQ ID NO: 880368 - DNA, 98 bp, Homo sapiens
aaattcatccagagggtccaggccatgaagagtcctgaccacaatggggaggacaacttcgcccgggacttcatgagtaatcaagtcagaggattata

SEQ ID NO: 880369 - DNA, 99 bp, Homo sapiens
cttcaccatcctacagatcttccctttcacctatgaaagcaaacgtatgggcatcatcgtgcggtacggcaagaagaagctgaaatacctgccctacaa

SEQ ID NO: 880370 - DNA, 98 bp, Homo sapiens
ttgaaggaaatgaattttgaaacttcacggtgtgccaccctacagtactgccctgacccttacatccagcggatagaccactggaacaatgagaagga

SEQ ID NO: 880371 - DNA, 99 bp, Homo sapiens
caagaggaggcaattgacaggaactacgtcccggggaaggagctatgaagacatgattggtgaggaggtgccatcggatcaatactactgggctccttt

SEQ ID NO: 880372 - DNA, 99 bp, Homo sapiens
aggtcattcctcacgtctaccccgtggctgctaagacacagcttggccggtgcttccaggaaaccattgggtcacagctctttcagtctcacatggcaa

SEQ ID NO: 880373 - DNA, 100 bp, Homo sapiens
aactgggaatctccactccggaggaactgggccttgaactgatagccatgcggtttacactttgtcaaggcccagttcctccggagtggagattcccagt

SEQ ID NO: 880374 - DNA, 99 bp, Homo sapiens
tatattgagaaggaggtaaaggccttgaaccggggcattgctgctgtcaaggaggatgcagtcgagatgctggccagctacgggctggcgtactccctc

SEQ ID NO: 880375 - DNA, 99 bp, Homo sapiens
caaggatgggcgccattcctgaggaagagaaccgctggacatgggttctctgaggatgggcccgaccctgcccgccctggactggcagctgccgtccca

SEQ ID NO: 880376 - DNA, 141 bp, Homo sapiens
aagctgaaaattgaaatcatgaaagtagacaggactaaactgaagaagacacctactgaggctccatttcagtcaagttaagaacaagtactgtggaactcatgcagtcatttggaagtaagcatctgctggactgaagga

SEQ ID NO: 880377 - DNA, 99 bp, Homo sapiens
aaccacaaatgtttttctgttttgcctgaatacatgatttaaacaagagatttccacagaagaacctgcacttgttgccaagtcttccatcttactaga

SEQ ID NO: 880378 - DNA, 98 bp, Homo sapiens
ttgtaattaatgcagtaaaacgcttccatatttatccagagatcagtcgcatcgaatacattcattcaaagaacttcatccaccgggatgtgaagcca

SEQ ID NO: 880379 - DNA, 99 bp, Homo sapiens
agccaagctcatctctgagacccggaggaggttcgaagctgagtatgtgacaggaaatgggtcctgatgaatatgaagagatggaagaagaggaggagg

SEQ ID NO: 880380 - DNA, 99 bp, Homo sapiens
tagcaggttccagctgaatcttgacaagaccatagagagttgcaaagcacaattaggatcaaaatacttgctggatggtggactcagagaccaataaaa

SEQ ID NO: 880381 - DNA, 99 bp, Homo sapiens
gctggagagggggcgctgagctgttggggtacagcagggaagaactggaaactcagagaaagaaactgcccttccatctacaaaagctgagtttacttc

SEQ ID NO: 880382 - DNA, 99 bp, Homo sapiens
acggataacagagttcacatattcaaacctgtatctgtgcaggcaatgtggtgtgaagatgccttaagaaaaaataagagcttaattgggccggatcaa

SEQ ID NO: 880383 - DNA, 99 bp, Homo sapiens
gttttagtgctgcttttcattcccacccccacccgcactgtctttctcaaggcacgaactgagctgatccttgccccagatctttaaatggatgagatg

SEQ ID NO: 880384 - DNA, 98 bp, Homo sapiens
ccatgcggcttttggcatatgctttggattattggtccaaggggcagttgaaagcacttttttcggaacacgagggtctcactgtcacccaggctgga

SEQ ID NO: 880385 - DNA, 99 bp, Homo sapiens
ggagagagcgagctgagtggttgtgtggtcgcgtctcggaaaccggtagcgcttgcagcatgcgagaaccctctgcccacagtggagattgccatccgg

SEQ ID NO: 880386 - DNA, 99 bp, Homo sapiens
cggggccgccggggccgccatggagcccgactcggtgattgaggacaagaccatcgagctcatgaagacagacatcttcctgtgaagggcttgtggcaa

SEQ ID NO: 880387 - DNA, 98 bp, Homo sapiens
cagccggagaagcgagtttcagctgatatacatcagtcaagtatgtgaggatgtcttctctggtcctctgaactctgctgtgcagctggctggactga

SEQ ID NO: 880388 - DNA, 98 bp, Homo sapiens
gtcttcctactgtcttgttttttccctgcaacagggtgtccgcaatgttgccagtgtctgtctgcagattggctacccaactgttgcatcagtacccc

SEQ ID NO: 880389 - DNA, 99 bp, Homo sapiens
ctggcaaacagtgtttgcctctggttcagctcatacaacagcttcttagaaccaaaaacttttgctagaaaatcagcttttacgagagaaaactcatgg

SEQ ID NO: 880390 - DNA, 99 bp, Homo sapiens
gttgctctgaaggatcttcttctttggtgtcctcactgctgcttgttatgtgtccggaattggttccttctggtgggttcctggtctggctggcttcag

SEQ ID NO: 880391 - DNA, 98 bp, Homo sapiens
cggggctcaagtggcttaacaagctggatgctgacaaatatgagaatgatccagaattagaaaagatccgaagagagaggaactactcctggatggac

SEQ ID NO: 880392 - DNA, 99 bp, Homo sapiens; identical to SEQ ID NO: 855579

SEQ ID NO: 880393 - DNA, 99 bp, Homo sapiens
gaacttttgacttggaagagaaactgcacaccaacaaatataatgccaattttgttacttttatggaaggaaaagtagagacggggtttcgccatgttg

SEQ ID NO: 880394 - DNA, 99 bp, Homo sapiens
caggattgatttttgaagataaaccgaaaccttccaaacagtcacttcagtcttaccaagaggctttgcagcagcaggacctgctgaagttcccatgat

SEQ ID NO: 880395 - DNA, 99 bp, Homo sapiens
gaagaacttgtacagagatgtgatgttggagaactatagcaatctggttttcttgggtcttggtggcacttgtgtaaatgtaggttgtattcctaagaa

SEQ ID NO: 880396 - DNA, 99 bp, Homo sapiens
tgggacacacctccattggatttaaaagacagtcctcgtcagcactgactttcagctatggaatcgaaatggtggagtcaatgaagaaagtagcaggga

SEQ ID NO: 880397 - DNA, 99 bp, Homo sapiens
tagatgagactaacatgtatgaaggtgtaggaagaatgtcccccccgcctccagccagcctgtgcagacttgctgcctgctgtgtcaccgggaacgcaa

SEQ ID NO: 880398 - DNA, 98 bp, Homo sapiens
gcactgctcatcttggccatcactatacacaacgttccagctgactggaaataccggcatgcaggattgatggccttatctgccattggtgaagggtg

SEQ ID NO: 880399 - DNA, 99 bp, Homo sapiens
tccacagtgtgcacagatgaacgaagttatggcagagttagctaaagaactccctcaagtttcatttgtgaagtagctgctgctggtggtgacaatgtc

SEQ ID NO: 880400 - DNA, 99 bp, Homo sapiens
ccgcctaaggcactgggtgtacctgctttgcttctctgcaggaattgaatgatctggcacgggaccctccagcacagtgttcagcaggtcctgttggag

SEQ ID NO: 880401 - DNA, 99 bp, Homo sapiens
ccaccacgcctctgcaatcatgggtcaccaagagaggctgagagaccaggggaaggtgtggctcattgactttaatccatttggtgaagtcacagattc

SEQ ID NO: 880402 - DNA, 98 bp, Homo sapiens
ttgtacagcgccggtcaacatcgcggtcatcaagtactagtacccaagtggccttggaccatctggagtctgtgcctgagaaactgagcctactagaa

SEQ ID NO: 880403 - DNA, 98 bp, Homo sapiens
tatttcagaactgttctcaggactcattattttaacatttgggagaaacacagccagaaggtataaatgaccaaggattgtacagagttgtgggggtg

SEQ ID NO: 880404 - DNA, 98 bp, Homo sapiens
ccagacaattgagtctatcaaccttctcaaatctaaaaaatgtcccttcattgttgcactcaataaggagatatgtcagtattgaattctcccagaca

SEQ ID NO: 880405 - DNA, 98 bp, Homo sapiens
ggctgctggtagttccatgctgtctgttcagacttcagcttggtaagaagaagaggacagtgctccagtgaaagtggaagaacaaaggaagatgagtc

SEQ ID NO: 880406 - DNA, 98 bp, Homo sapiens
gtaattggagccaagaaatgagtatagctcaagactgcagtgcagatgacgacaacttccttgtgcccatagcggtgggagctgccttggcaggagta

SEQ ID NO: 880407 - DNA, 99 bp, Homo sapiens
agagactaccacgtggcatgttaccactgtgagagggctgaggactatgggcctgtggaggtgatctcccattggcaccccaacatcaccatcaacatc

SEQ ID NO: 880408 - DNA, 99 bp, Homo sapiens
cgcattgccgccggtcctgaccaccgtgaacggacagtcccccccagatataattggtgattacaactttcctctataaattaactcttgacactcctt

SEQ ID NO: 880409 - DNA, 99 bp, Homo sapiens
gctgcccggagaccagtgatacaggcagcagcttcatgagatatttgcagtttaatccttttccataggttccacatttgatggcttaatatcaggatt

SEQ ID NO: 880410 - DNA, 99 bp, Homo sapiens
ctgggttttacagcacttggccaagctagatgtcaaggcagaacgttaccagagtctccttgaagaactgaaaatgaacaagatacaactgcagctttt

SEQ ID NO: 880411 - DNA, 99 bp, Homo sapiens
gagcccccagcgcagcggccgcgtgatgtcttggcattgcccattttcaagcaggaagattccagccttccattggatggtgaaacagagcacccaccc

SEQ ID NO: 880412 - DNA, 99 bp, Homo sapiens
atggcgtcttccgtgggcaacgtggccgacagcacaggtttggggcaagatggaaagacactgctaattacgaatattgacatggagccatgcacggta

SEQ ID NO: 880413 - DNA, 100 bp, Homo sapiens
cttgggttcaattatgtggtcaaataacaatttggacaagacagcaaatgctattgtcgaagttttctaaagaagaatctgaagtgaaatgacatcaaga

SEQ ID NO: 880414 - DNA, 99 bp, Homo sapiens
aagagagaacgcaaacagtttgaagctgaggattttcttctcaataggtttggcatggacaagatctatgaaggccaagtggaggtgactggtgatgaa

SEQ ID NO: 880415 - DNA, 99 bp, Homo sapiens
tgctgtacagtattggaaatggatctgtctttggtaaagatcaggttcaagattatctaagaagatttgaaagtataccagatatgcttgaattggatc

SEQ ID NO: 880416 - DNA, 99 bp, Homo sapiens
ggcatgaggaggaagacggggcttccaggagttctcactgtgaactcctaaagctttccagactgcgaagctaatcacaccaaccccacaccatgcata

SEQ ID NO: 880417 - DNA, 99 bp, Homo sapiens
ccagaaagccattgagatctatgagcagtgatgtcttggcattgcccattttcaagcaggaagattccagccttccattggatggtgaaacagagcacc

SEQ ID NO: 880418 - DNA, 98 bp, Homo sapiens
agcaagcttgctgatgtccttgaagaggatttattggatcattcgtgtacatcaggaagtggctctggtcttccttttctggtacaaagaacagtggc

SEQ ID NO: 880419 - DNA, 99 bp, Homo sapiens
caccgattgttctcacgttgtcccggatcagaatgccttgggcttgcatcatgaagaggtaggtgttcatgctaactttcatgctgccaaaagctgaag

SEQ ID NO: 880420 - DNA, 98 bp, Homo sapiens
tcacttttacctgtttggattaatatgtctctgttcagcttctgaaagtacagagaagcttaacaactccactggcctccagagctcctcagtcagtc

SEQ ID NO: 880421 - DNA, 99 bp, Homo sapiens
acatgcccgctcacctgcgctgtgatgcctgcagagctgtggcttaccagtgtcctactgtccgtggcagagctgtactggcgatcttcctcccctacc

SEQ ID NO: 880422 - DNA, 98 bp, Homo sapiens
gggggactggggcgccgaggcgtgcacatgctcgcccagccacccccaggacgccttctgcaactccgacatcgtcattgaagtcaacaagagagaca

SEQ ID NO: 880423 - DNA, 99 bp, Homo sapiens
aactatcttatggagggcttatccccataacctgatgactcatgagggtcctgtgtggcaagtggcctgggctcaccccatgtacggcaacatcctggc

SEQ ID NO: 880424 - DNA, 98 bp, Homo sapiens
ggagtaacttggccaggctggccccgagcggaactggagaaagctgaggaatgattacggacctgaagccaaagaacaagatgcgctagtggacagat

SEQ ID NO: 880425 - DNA, 99 bp, Homo sapiens
ctagaagtgccaaaggcgaagttgccaaagcagccaaggtgaagcagaaaggagacaaggagaaggccttaggatctactgggggagtccggaggagca

SEQ ID NO: 880426 - DNA, 98 bp, Homo sapiens
gcagaccccctcgagccgcgaaggagcccgagaagcagccacgatgtgcggtaaagtcagtgataaatcttttgtttgctgcatatactggagatgtg

SEQ ID NO: 880427 - DNA, 99 bp, Homo sapiens
ccaggtgagaaaggcccacctgtgtcctggttgagggtctccagggttctttggggcccgagcatctgcaaacatagagaattctgggcttccacacaa

SEQ ID NO: 880428 - DNA, 98 bp, Homo sapiens
gggagagtagggtgctgtggtctgagctagagggtgaagctggcggagcaggaggatgggcgacctgcaggctgggacaatgaaaagaaaatagctat

SEQ ID NO: 880429 - DNA, 99 bp, Homo sapiens
agaaggacccacggcgtctgttcgaaggatggtgccatgacaatggtgtgaactacaagattggagagaagtgggaccgtcagggagaaaatggccaga

SEQ ID NO: 880430 - DNA, 99 bp, Homo sapiens
ctttgtctccttcgacttggagtctttgtccaggacgaatatggttgagccccttatacccacgaattgctgatggaacccacaaatctggagagtcgc

SEQ ID NO: 880431 - DNA, 98 bp, Homo sapiens
gcattggcagcgggagccgtccggaggacctgggacaccgcggaagtcgggaaatgggctaccctgagaggaatctacatgcagagaagttcaggaga

SEQ ID NO: 880432 - DNA, 99 bp, Homo sapiens
gcatatgtctgcacgctgaggccgaggcggagaaggggcttcctgagcgtcccagtacactgacagagaccattcctcaagaattttgtatccaaggcc

SEQ ID NO: 880433 - DNA, 98 bp, Homo sapiens
ttactactatcctcattatctccaaaccaaggctttgatgcggcctggaagaattgatagaatcatctatgtgcctttaccggatgcagcaacaagaa

SEQ ID NO: 880434 - DNA, 99 bp, Homo sapiens
atattttggacatctggtttgatagcggaacttcatggtcttatgttcttccaggggctatcaacagcaggacgcccatgaattcatgcgctacctttt

SEQ ID NO: 880435 - DNA, 99 bp, Homo sapiens
ttcacaagaagattgtgcaaagatgaagaacctatgcattatggaaacataatgtatgacagaagggtaattcgaggtaacacttatgcactccagaca

SEQ ID NO: 880436 - DNA, 99 bp, Homo sapiens
ctggtaacgtttttatccatggatgacttgcttggatcgacgtaattaacacattccagacgggagcctcttttaagggagtcctaaggcgacagaaca

SEQ ID NO: 880437 - DNA, 99 bp, Homo sapiens
gctggatttccggaggcaacagatgcaggatttcttcctggcgcacaaagatgaggagtggtcctgtatggtggaagagtcggggaccctcgaatccca

SEQ ID NO: 880438 - DNA, 99 bp, Homo sapiens
ctgggaacaagcacaggcctgaaggggagcccaagggtgcacagcccctggctacggtgattgaagcctccgatgttgtcctagaggtgttggatgcca

SEQ ID NO: 880439 - DNA, 98 bp, Homo sapiens
gcttccacccggaaagccccccaggctgagtgcggcatgatctccatcaccgaatggcagaggctctgcgagtgacccggcgggcgagctccgtgctg

SEQ ID NO: 880440 - DNA, 99 bp, Homo sapiens
gaactgtctgccctgagagcagagcatcagcaagactcagaagacctcttcaagaagatcgtccgggcctcccagaaacacgaccctcctctgagtagc

SEQ ID NO: 880441 - DNA, 99 bp, Homo sapiens
ccgaaaagggtgggctgacaccgtggacatggacactgactggtgaagcacctgctgcgcctgctccaccgagtattcataatgtagaatcagtgggag

SEQ ID NO: 880442 - DNA, 99 bp, Homo sapiens
gccgaagagcttgtgtgcggagctgagaggcctatggatgaggaggacgcggcggccccgtggtgggggaaaagtagctccagctcaaccatctgagga

SEQ ID NO: 880443 - DNA, 98 bp, Homo sapiens
gaggcgcaaacaagccaatcccaggaggaaaaacggttggagtcagttagctgctatgcactgtgttatgctgccagacctactgggattggataaat

SEQ ID NO: 880444 - DNA, 99 bp, Homo sapiens
cattttactgtcaagacatttcttcggcattctgcaacaggctgttcacggaagaccaggatgtagatgagggacttgtctatgacactgtattcaagc

SEQ ID NO: 880445 - DNA, 98 bp, Homo sapiens
gggcggaagaaaatacaaatcacacgcataatggatgaaaggaaccgacaggatggacaaccggaaattttctacacattttggaattcagttactca

SEQ ID NO: 880446 - DNA, 99 bp, Homo sapiens
ctccaacccctgctatggcaaaggcaatgcagagatggagttggtccagcatattggaatccctgccagtaagatcatctgcgccaacccctgtaagca

SEQ ID NO: 880447 - DNA, 99 bp, Homo sapiens
gatgatcatgatacagttgataaaattgttgtatgagaataatgttatcactattgatctggttcaaaattcttctcaaaaaactcagaatgatgtgga

SEQ ID NO: 880448 - DNA, 99 bp, Homo sapiens
cttaggaatgtttttgccacacttaacagatgtccaaaaagactcctgactgctgaggacggaaagacggcagaagatcttgctagatcggaacagcac

SEQ ID NO: 880449 - DNA, 99 bp, Homo sapiens
gtgggcctttctgtgtcctactccttgcaggcgggatgtagctcattttgggatacgagtctccatcgtggagcctggcttcttccgaacccctgtgac

SEQ ID NO: 880450 - DNA, 99 bp, Homo sapiens
gagagcttcgagcggactcagactgggctggcttagatgaagatgaagatgcacatgtctgggaggataattgggatgatgacaatgtagaggatgact

SEQ ID NO: 880451 - DNA, 98 bp, Homo sapiens
ggacaatgaactcacctttaaacatggtgaaataattattgttttggatgacaggactccctggaggaaaagcggaagcggcagcggtctgaacgcct

SEQ ID NO: 880452 - DNA, 99 bp, Homo sapiens
tggaaagatgacctgattcaatcttttcaactgtttaatattgtgtggtgtcacatctcccagctcgatccggctactcgtaagaatgtaaggcgaaaa

SEQ ID NO: 880453 - DNA, 99 bp, Homo sapiens
agtgttagacatcgagatcaatgaacctttagatgaatttacaattcaaccctatgaaaagataaaggccaggggcttgcctgataatatatcttccgt

SEQ ID NO: 880454 - DNA, 99 bp, Homo sapiens
tctgctggagtccagcaggagccaggagcaatttacagcaatgagggatttatacatgaaaaatggacaaggatttgcattagtttattccatcacagc

SEQ ID NO: 880455 - DNA, 99 bp, Homo sapiens
ggagggtcccgtgccagatcattcaattcttgcagcactgacaggttggtctgtccagaaaggctcagcttctcctgctctgaggggtaggcgttgtag

SEQ ID NO: 880456 - DNA, 99 bp, Homo sapiens
caagggcagcagctggcgactttctccagtgactgggaaatccaggaagacagtaggaaagtgaagtcactgcttttgctgtcttggatcaagaccaga

SEQ ID NO: 880457 - DNA, 99 bp, Homo sapiens
cgcacattttgcagcctgcaccggccaacgcaatgccaagtgagtacacctatgtgaaactgagaagtgattgctcgaggccttccctgcaatggtaca

SEQ ID NO: 880458 - DNA, 99 bp, Homo sapiens
gtgaacagtggacagactgctccctactacgctgccctgggtgctgtaggagcccatctgactcaccaggggcctaatagccacaacagcaacacacca

SEQ ID NO: 880459 - DNA, 99 bp, Homo sapiens
tccaatcctctgcttccaggacaagtcctgcgcttggggatcctctgtacgcccgttcactggctgacatgacatgtagaggctttcgagaatatcatg

SEQ ID NO: 880460 - DNA, 99 bp, Homo sapiens
ccttcaagcactttaacaagcttagagaatttgttcagatgaagcttcctccaggctttcctgtaaaattagcttggaagctcgaagtctggctgtggc

SEQ ID NO: 880461 - DNA, 99 bp, Homo sapiens
ttaaaacgggtcagttggcagccatcaaagttatggatgtcactgagtgctgggcctaaaggagataacatttatgaatggagatcaactatacttggt

SEQ ID NO: 880462 - DNA, 150 bp, Homo sapiens
agagaatgttggtggcaaccagtgcttgggaataacgagcaacgcatcagcaaatcgttgctcgttattcccaagcactggttgccaccaacattctcttggttgatgagatcatgcgagctggaatcttctctgaaaggttgaattgaa

SEQ ID NO: 880463 - DNA, 99 bp, Homo sapiens
ggcctacctgagaagaaagtctgtggaataatggcaacagaaagactggctaactacaccggaggcatctatgccgaataccaggacaccacatatata

SEQ ID NO: 880464 - DNA, 98 bp, Homo sapiens
caacatccaagggctggtggcagcagctgcagccggaggcattatgactctgccactgcaaaatctacaagagttcccgattttgaaatgctgggctc

SEQ ID NO: 880465 - DNA, 99 bp, Homo sapiens
cgggaacagccatgcaaaggcaggggaggaagccacctcgagctcttgcagaccattttctacggggtcacctgcctggatgatgtgctgaaaagaacc

SEQ ID NO: 880466 - DNA, 75 bp, Homo sapiens
tgcaccaacactgcacttaaataagggcacacctagtcaggcatgtaatgaatttactacacatgtgatgaacct

SEQ ID NO: 880467 - DNA, 98 bp, Homo sapiens
ctcaacaaacaccagcgctttgggttttggcttggtttgaagaaggtgaagaaacaattacagcctttgtagaaccttttgtaattttactcatatta

SEQ ID NO: 880468 - DNA, 99 bp, Homo sapiens
gcaacagcagcaactgccgcacccttgaaaggaggcccctgccgtgtggacccgtaaaataaaatgggaattgaatgatctggcacgggaccctccagc

SEQ ID NO: 880469 - DNA, 99 bp, Homo sapiens
aaatggcaactttaaagaagcagaagaagtctttgaaagaatatttggtgatccaaattctcatatgataattcatcaccttcgactgagcattcacaa

SEQ ID NO: 880470 - DNA, 99 bp, Homo sapiens
cgtgggggaccggctgttggcggagcagccatggaggaggtggtgattgccggcatgtccgggaagctgccagagtcggagaacttgcaggagttctgg

SEQ ID NO: 880471 - DNA, 99 bp, Homo sapiens
gtttctccaagtgttcttcataactgcggatcttgacagacaaggcaataactcttcattgagactcagggcactgagcagggaatccaggtcctcaaa

SEQ ID NO: 880472 - DNA, 99 bp, Homo sapiens
aaactggcggctgctggtagttccatgctgtctgttcagacttcagcttggtggcatatcgatgcatttacttcaaaactttttctactggaagaaatt

SEQ ID NO: 880473 - DNA, 99 bp, Homo sapiens
atgaacccaacctagtgggtgtaatacatcatgaactgcaggtgatgagctactcctgggtcatgagaaggcccctgccttcagagactatgtggctgt

SEQ ID NO: 880474 - DNA, 99 bp, Homo sapiens
agaactagcagattttgtaagggaacgaaatttaaaagcctgttgattcaagaactttctaaagtatttccggaagacatggctaagtatcgaagcatc

SEQ ID NO: 880475 - DNA, 99 bp, Homo sapiens
taactataaaggagagcgccaaaccattactgatgatgtggaggttaacagctatctttctgtggcagcacaccctgggccccccactccccgccgcaa

SEQ ID NO: 880476 - DNA, 99 bp, Homo sapiens
acagctttgccacaaagcccagtctgtgtctcaaatcaaccacaagctggagggacctgttgcaatgagagtggcaaaattagcaattaatcaagggat

SEQ ID NO: 880477 - DNA, 98 bp, Homo sapiens
agatctcggagatcgagaaggagatcgctcggacacagaagaacaagggcaagaccacaccattgtggacacagtgctgatggcgccccgctcggcca

SEQ ID NO: 880478 - DNA, 99 bp, Homo sapiens
gggcgtaggaccctctgagccagattctgtttctggcgtctgcatacgcaagtccccaactcgctgaggagagctgttcagctatggctgctgtcacac

SEQ ID NO: 880479 - DNA, 99 bp, Homo sapiens
tgagggccaagcaggaacaggggtcacggggcaaggagcacgtggcagcgcaggaaacaggtctcctctgagcctccggcctccataagacccaaaaca

SEQ ID NO: 880480 - DNA, 99 bp, Homo sapiens
tagatttgctgcaagatcccaatgggtttgtgttgctagttaagctagcttgtattgttgtggcttccttcgttctctgctggctgccattctttacag

SEQ ID NO: 880481 - DNA, 99 bp, Homo sapiens
gccaatgatggctttgtacggcttagaggacttccctttggatgtagcaaggaagaaattgttcagttcttctcaggtgccacacattgaagcacttct

SEQ ID NO: 880482 - DNA, 99 bp, Homo sapiens
gaacccgtggtcctccgcttcatccaaatttgtatcctactgtggggcttcaaacaccaggagaagtggtcgatgccaattttgggcaacatcctttcg

SEQ ID NO: 880483 - DNA, 99 bp, Homo sapiens
gaaaaaaattatatttatagatagcacctggaaccaaacaaacaaaatattcactgatgagcgacttcaagaagtggaacggatagtgaaagccaatga

SEQ ID NO: 880484 - DNA, 99 bp, Homo sapiens
ccattttgccctgaaagtcccagatttttgctcattaacagaaaagaagaggagaatgctaagcagacatctccaccccgaggtggtttgaactttgag

SEQ ID NO: 880485 - DNA, 98 bp, Homo sapiens
ggaggctttcagccggagaagcgagtttcagctgtcatggctccgatcttcatcttgaagaagagtgacattgggtgactgctgcttggaaaactgtc

SEQ ID NO: 880486 - DNA, 98 bp, Homo sapiens
acacatgatcatcagtatttgcctcctgtgtcccaaccggcctgagtcaaaacctatgagaaccccaaagacattaaagattgctgaaatacaggcaa

SEQ ID NO: 880487 - DNA, 99 bp, Homo sapiens
gatcccagctgtgctctggacagggtttcaggcacccgtggatgagcagtcagagagtctacagaacacgcacgacgacagcaggaacaacgcggcctc

SEQ ID NO: 880488 - DNA, 98 bp, Homo sapiens
aaaaatttttactgtgttaagtggaaacagtgtgtggctttgcaaaaacgaacagatccctgcatgtcactgagtccaccatgctttacagaagaaga

SEQ ID NO: 880489 - DNA, 98 bp, Homo sapiens
gcagatcctgagacccggacagtggcagtgaaacagcggagccttaaacaacgcagtgagacagacatctatcatcccattttacaggggaggatact

SEQ ID NO: 880490 - DNA, 99 bp, Homo sapiens
gtggttggaaatggcacctatggacaagtctataagccagtaatgttaaagtagagactcagagtgatgaagagaatgggcgtgcctgtgaaatgaatg

SEQ ID NO: 880491 - DNA, 99 bp, Homo sapiens
cccaagccagttccttcttctcctaaaaattcaacctgtgggcatcaactcgagcctgggaagcattgtcctctgtgtaacttccgagcaattccacca

SEQ ID NO: 880492 - DNA, 98 bp, Homo sapiens
tcttgcctgtgtcccacttgttcgcggcctatagccgattacacctcaacaagaaggcaactgacaaacagccttatagcaagctcccaggtgtctct

SEQ ID NO: 880493 - DNA, 99 bp, Homo sapiens
ggagtcgctgggtgcgtggggctgcctcgccgcgtctcgccacgatgctccaagtcatagaaatgggaaaagcaaatggtcattcctgttcagtttgac

SEQ ID NO: 880494 - DNA, 98 bp, Homo sapiens
ccggaagctctttgaccttctggatgtccttgagttcaaccagcctgatctagttgaatctgaagatgtggacctgctgatgaagagggctgactgta

SEQ ID NO: 880495 - DNA, 149 bp, Homo sapiens
ccaagactcagtataaccaagtaccaagtgaagactttgaacgcactcctcagagtcctgctgagtctggatcatggaacttaacaaagcagacacgagatgagactggcaaaggcgaatcacttagcaggtgggagagtcggactctg

SEQ ID NO: 880496 - DNA, 99 bp, Homo sapiens
ctgccgtacaagctgatctccctgctaaatgaaaaagggcaagatactgggaatggcctgtccagaagacagccaaatacatccttcaaacagacttca

SEQ ID NO: 880497 - DNA, 99 bp, Homo sapiens
tctcgcctcgggtctcgggggccgctctgggatcccggccaccagcaattgtccggtatgggctacgtgagttcgtggtgattgcccctgctgcacaca

SEQ ID NO: 880498 - DNA, 99 bp, Homo sapiens
gtgaatgtggaaaggagattgacagtcacaattttgtaataaggaaccagggaaaatgtgtagagggcatggtggagatcttcgacatgctgctggcta

SEQ ID NO: 880499 - DNA, 99 bp, Homo sapiens
agaggaagaggaaagcaaaggagtcagggatggctcttcctcagtgaaatattgtggggctgagatccctcgtagcaacaaaaagtttgctaccatcgt

SEQ ID NO: 880500 - DNA, 99 bp, Homo sapiens
tcagatattccgtgagatgtatgtgcgttttttcttcagactccattccatctcttctcatccttctggcaagtgtccagagaatggctgggatgaaag

SEQ ID NO: 880501 - DNA, 99 bp, Homo sapiens
cggcgccatgtccagcgctcggacccccctacccacgctgaacgagagggacacggagcagggtcgagcacgcacgcatgcatgccaagcaccgtggcc

SEQ ID NO: 880502 - DNA, 99 bp, Homo sapiens
tgggggctttgaaataacaccaccagtggtcttaaggttgaagttggtcgtttttgatgctcgatgaatgctgggaattcagaggaatgtcttcactta

SEQ ID NO: 880503 - DNA, 99 bp, Homo sapiens
tcagatgataaaccactacgcccgggctggctcctttaccacaaaggaagttattccaacttttgacatggctgtcaatgaaatcttctttgaccgtta

SEQ ID NO: 880504 - DNA, 98 bp, Homo sapiens
gacgccactacagttcatcaacatcaactacgtccctctgaaggacaggctgctttggtttgtgacctccaggcaggacggccatcctctccagaatg

SEQ ID NO: 880505 - DNA, 98 bp, Homo sapiens
ggcatgccaagaagatgagaccgggggaggcgacgctaagttgctgatcgtggcgaggaagtatcattctgcaaaggaggcatatgaacaacttttgc

SEQ ID NO: 880506 - DNA, 99 bp, Homo sapiens
ttcaaccaccatgagcagtcctccgaggacatctgggctgcgtgctgtgttgtcacaaaggcatgaagctttgctgtattatgttttagcagcagaaac

SEQ ID NO: 880507 - DNA, 99 bp, Homo sapiens
gttattccttgcagatttcttctcatttgggttccaggtttcactcaaaaattcacacactcaaatctggccctatctgtaattccaacactttgggag

SEQ ID NO: 880508 - DNA, 100 bp, Homo sapiens
atagcagaattcagttacaaattcttgaggcacggtaccttccaagctcgatgagcttggaaggtaccgtgcctcaagaatttgtaactgaattctgcta

SEQ ID NO: 880509 - DNA, 139 bp, Homo sapiens
ctggacttcagggttgaatacagagacagaaatgttgatgtggtacttgaagacacctgtactgttggagggaattgtcgagaatcttttcaaatgggcccgagaggccgatcaaccattgaggacatattctactgga

SEQ ID NO: 880510 - DNA, 99 bp, Homo sapiens
cttgccaacaatcattaagtgtccaagaagcagctgaaactcgcttctccggctgaaagcctccctgatgccagaatccctccagagtgcgctcagggc

SEQ ID NO: 880511 - DNA, 99 bp, Homo sapiens
gcctcccaagtagctgggattacagactggaaagctacccttgaggagaataggttgaattctgaaaaagatcgagctagggaagaactatcccaccac

SEQ ID NO: 880512 - DNA, 99 bp, Homo sapiens
gagctgttgaagcagggggcaggatttaagtgccctgtatgctcaaaatttgtatcctcagatgaaatggatttgcatcttgtaatgtgtttaacaaag

SEQ ID NO: 880513 - DNA, 99 bp, Homo sapiens
gctggtttattgcgacgggcacggctgcagcgtcgcggtgcatcaagatggacaatctaaaatatgtaaatcagttgaagaaggaaaatgaacgtgccc

SEQ ID NO: 880514 - DNA, 98 bp, Homo sapiens
gagcacgtggagatggctttgctcagcaacatcctagcggcctattcctttgtctcaggtacatggccatcatacatcccctccagccccggctgtca

SEQ ID NO: 880515 - DNA, 99 bp, Homo sapiens
gcgggggtaaaatatgaacacgtgtgtcttcattggaaacattgaccagatgccatcaatttgttgacattttgtttctgtaggtggccaatgaagtgc

SEQ ID NO: 880516 - DNA, 99 bp, Homo sapiens
gaacccgcggcgcaataacggttatggaattccactgaaagacggagatgagaaaacagatgaagaagcagaggggccatattcagataatgagatgtt

SEQ ID NO: 880517 - DNA, 98 bp, Homo sapiens
gcagagacaccaggacagaaaagacagtgttctgctttcatggagttcacagaagagtcgaggagggatgactggaaaccatacaagcttagaagact

SEQ ID NO: 880518 - DNA, 101 bp, Homo sapiens
gcctcccaagtagctgggactacagttgagggagaagacttgcaacaagaagatggacccacaggagaaccacaacaagaggatgatgagtttcttatggc

SEQ ID NO: 880519 - DNA, 100 bp, Homo sapiens
gtgcagccagttcaaagactaaactgccaaagttcagaaccacacttcacttgtttggaggatggtgaactttggcagtttagtctttgaactggctgca

SEQ ID NO: 880520 - DNA, 123 bp, Homo sapiens
ctggactacgtggcggcgctggaagggatgtcgtctcagcagtgctcgggcgcagggcaaacactgtatccttgatgtgtctggaaatgccataaagagattacagattgcacagctttaccc

SEQ ID NO: 880521 - DNA, 99 bp, Homo sapiens
agtagtgcccgccccacccgcatgctctttgtcactccccggcggcagcacgaaagtaccatggaccagttactctccacaagaaaattcacacaacca

SEQ ID NO: 880522 - DNA, 99 bp, Homo sapiens
gaatcctgatgacatccttctttttagagatcgttttgatggatatatcttccttgacagcaaagatcctctgccttgtcaatgttagtcacaatggtg

SEQ ID NO: 880523 - DNA, 99 bp, Homo sapiens
ccatacaaacaacctggaggtgaggatagtgtgtgtaccatatcagtggcgtgtaactatgctcatcattgttcttgtcaatgcctttgtgtctatcac

SEQ ID NO: 880524 - DNA, 99 bp, Homo sapiens
ttgagatagatttggctctagaagcagcgacagcagtatataccttactagtagtgtttattcttctaaaatctcccaaaatgggcagcaatctcagga

SEQ ID NO: 880525 - DNA, 99 bp, Homo sapiens
aaacgcctggatcagccacaaatgtacccccagtacacttactactatcctcattatctccaaaccaaggtgagctgtcagggagaaatgtcgaaacag

SEQ ID NO: 880526 - DNA, 99 bp, Homo sapiens
cctatggatacaagcaataatatgattcctcagattatgcccagtatatccagcaggggttatatcttaagtgtggtgctgctaacattgcccaggcag

SEQ ID NO: 880527 - DNA, 99 bp, Homo sapiens
ccaagaacaacctgtattgagtttctctttgagatgattggactgctctatccagcatcattgaggttcgatacaagaggctgttttcctagcgtggct

SEQ ID NO: 880528 - DNA, 99 bp, Homo sapiens
tcctgcctcaccctcctgagtagataggactacagagctgaaaccaccaatgggtgaggtcgtcacccctacggccccccaggagcctcctgagtctgt

SEQ ID NO: 880529 - DNA, 99 bp, Homo sapiens
gcggagctggaatgactggcaacccagcatgaacttacgagaggtgttaaaaaaatatggtaaagatgttggtcttcatattaaagctgtaagatccta

SEQ ID NO: 880530 - DNA, 99 bp, Homo sapiens
gccatcaatttttagaatttctttaagcatccgtgttcccttcttgctacaagccaaatggagggcagtatttttactgttatcttgtaaagtcagttc

SEQ ID NO: 880531 - DNA, 98 bp, Homo sapiens
agtcatctgtcttctgagtcaacactcccgacctggtaaacaacctgctcagggctctggtgaacaagctgtaggctgttaccttctcctctcaagga

SEQ ID NO: 880532 - DNA, 99 bp, Homo sapiens
gggatggggatggggcgctgctattggtcagatcagctgaaggccggggtttcagggtgatggtgtcgccttccagctgtaatcccagctacttgggag

SEQ ID NO: 880533 - DNA, 99 bp, Homo sapiens
ctgcctgggagaatgttgactctactgcagtcattatttagaagcaaggtccttgaatgagcgagattatcgggaccggagatacgttgacgaatacag

SEQ ID NO: 880534 - DNA, 99 bp, Homo sapiens
acctgcactttggggagcctaagtcctgtctctggatggtcgtcagatccgtgtggatcatgcaggcaagtctgctcggggaaccagaggaggtggctt

SEQ ID NO: 880535 - DNA, 98 bp, Homo sapiens
gggaacagtcgaaaaagtgggatcatcggtaaagcacctaaaaccagcaccttggaacatttcaagaggtggctccagccagataaagtagccgtcag

SEQ ID NO: 880536 - DNA, 98 bp, Homo sapiens
gggggtcctggtctttggcttctcgactcggtcctgtttcgacagcgaacatgtcgcggcctgtcagccacatgaaatgaagatcacctctgcctatc

SEQ ID NO: 880537 - DNA, 98 bp, Homo sapiens
gggaagggacctcgaatgtgggaccccagcccctctccagctcgaaatcacctggcctacggctctgtgatcactgtgaagaacctccggatggccat

SEQ ID NO: 880538 - DNA, 141 bp, Homo sapiens
ggaaagtgaacagcttcaggtacctgtctcactaattgctctccttctagatgagggagagcaattagtgagacaggtacctgaagctgttcactttcctgccccttccagagattgatcatatcatgcagctgcatgtca

SEQ ID NO: 880539 - DNA, 99 bp, Homo sapiens
ctgttgtgcctcttcatattggcgatcctgttgtgcttcagggatgacttcttagggggcaggggaggtagtcgcccaggcgaccggcgaacaggcccc

SEQ ID NO: 880540 - DNA, 99 bp, Homo sapiens
agaagaccattcagatgggatctttccggatcaatccagatggcagccagtcagtggtggaggatggcacaacagcattattgaaagcagccaacaaag

SEQ ID NO: 880541 - DNA, 130 bp, Homo sapiens
cttgaagttgtggataaacggaaccccaggttaattcgtgttgctacgattgtagatgcgcattactggtattttatcagcctctttactctttggtcatcaacatctacaatcgtagcaacacgaatta

SEQ ID NO: 880542 - DNA, 99 bp, Homo sapiens
ctccgtcagttttgttgcttctttatccttacattgcacacagcccattatctaaattccacgactggtcctccccatgcacatgttgtctggggtgac

SEQ ID NO: 880543 - DNA, 99 bp, Homo sapiens
aaatgttcaggacttcaaacgagcttctgaagaaatcaccaaggcatgtactggcattgaaaacattgacgaagctattacattgcttgaacaaaataa

SEQ ID NO: 880544 - DNA, 99 bp, Homo sapiens
aatgaccaaactggaaatgctctgacagagaatgagatgaccacaattcactatgatagaattacttctctacagatgtgttccagctgccaagaagcc

SEQ ID NO: 880545 - DNA, 99 bp, Homo sapiens
cctcaaaggtcctgacaatccacagtgcagggaaggcagagttttagaaagagcgttttcgctacgtaaagcacattcgataaaggatatggaaaatac

SEQ ID NO: 880546 - DNA, 101 bp, Homo sapiens
gggcgacagagcaagactccgtggtgcgcgctcctccgggagacaggggtccgttggttggagaggtacgggctgctcaggtccgggatcatcaggaaggg

SEQ ID NO: 880547 - DNA, 98 bp, Homo sapiens
ggtattctgggtctccctggctcgagaggtgaacgtggtctaccaggtgttgctggtgctgtggttgcttcagttattaacatcaaccccaatacaac

SEQ ID NO: 880548 - DNA, 99 bp, Homo sapiens
ggctgacttccagccggtggcacagacgcctccagggggcagcactcaagcgcatcttaggaatgacagtgacaaatggcctacagctgtgagagcaaa

SEQ ID NO: 880549 - DNA, 99 bp, Homo sapiens
gaggagccagccttcaatgtgtcctacaccaggcagcccccaaatcccggcccagattatctttctcaaggaatagatctttctggaatagaagtgata

SEQ ID NO: 880550 - DNA, 99 bp, Homo sapiens
ccgtgcggcagcagctccagagctttgtcaaagaggctgtgggacagatgatgtctaccatgttctacccactggtcacctttgtcctcctcctcatct

SEQ ID NO: 880551 - DNA, 99 bp, Homo sapiens
gtccggagggcagggcacagcaatccacgggtctctgccccactgagcttgcatgtcagacacacattttcagtcaagactcagattcaggaacttctt

SEQ ID NO: 880552 - DNA, 98 bp, Homo sapiens
gcgctggaagggatgtcgtctcagcagtgctcgggcgcaggtgctggagaatctggtaaaagcaccattgtgaagcagatgaggatcctgcatgttaa

SEQ ID NO: 880553 - DNA, 98 bp, Homo sapiens
agccaagatggggaatggaactgaggaagattataactttgtcttcaagggctacccacctttctgttctgagacccctcaagagacatataagaagg

SEQ ID NO: 880554 - DNA, 99 bp, Homo sapiens
caccattcagctctacctgggggtgtcaagacaaaagatgcttcagctttggaaacttgttctcctgtgcggcgtgctcactgggacctcagagtctct

SEQ ID NO: 880555 - DNA, 98 bp, Homo sapiens
cagtctctccctgccaggctcttcatccaagctttcaggatgccaacccgcccctgaaggttattccccaacacttcaatggcaacagcaacaagtgg

SEQ ID NO: 880556 - DNA, 99 bp, Homo sapiens
ggactgcttaaaggaaatagcagacagacagtatggaggggctacttggtaactataactacccaatattgcagccatggagtccatgcttaataaatt

SEQ ID NO: 880557 - DNA, 99 bp, Homo sapiens
gcagctacttaatcctactcagaagaacttgtacagagatgtgatgttggagaactatagcaatctggttttcttggactgtgaatgaaagctggaatg

SEQ ID NO: 880558 - DNA, 99 bp, Homo sapiens
ccagcgccagcccacactgtcctgtgtacgtgccggatcccacatccaccatcaagccggttcttccaggttggaaagagaatatgctggagagctgtc

SEQ ID NO: 880559 - DNA, 99 bp, Homo sapiens
gagccaacaaaaattgttttttctacctgttgacgtgtcaagcactaactgtgaccaagaatatggcccaggtgaccaaagccctggacaaggccctga

SEQ ID NO: 880560 - DNA, 99 bp, Homo sapiens
ccgcaagtacccgtccatcatagtcaactgcgtggaagagaaggccaaagaggtgctgaaaaaatatttggagtccaaggaggatgtggctgatgcact

SEQ ID NO: 880561 - DNA, 99 bp, Homo sapiens
gcagcatggcatttcagtcactggtttgcagagtccagggagaagagaagtttacctttattgagaaatgtaacaaccctcgttctgtcacattattga

SEQ ID NO: 880562 - DNA, 98 bp, Homo sapiens
tggtgtataaccttggactcacactgctgtctctgtatatgttctgtgagatgacccctaaatccaaaaggaagagtatccatagccgaatgctgcgg

SEQ ID NO: 880563 - DNA, 99 bp, Homo sapiens
aagaggagaagcagaagcacttggataaaatttatcaagaaagagccagccaggcggagagggagatgcaagaggagaaggcagagcccccccaggcta

SEQ ID NO: 880564 - DNA, 99 bp, Homo sapiens
gacgaatcttctggatgtccctggattgaagaacgggcacgcgctcttggcattcatgttctcgcgtcaggagggcaagttgaaccgccagcagaccat

SEQ ID NO: 880565 - DNA, 98 bp, Homo sapiens
gaagaaacggcgtttagagcaacagatcgtggatctgaaagtgacaagcattttagaaaggttccagcaacagatagaaatgctttaagttcactctg

SEQ ID NO: 880566 - DNA, 99 bp, Homo sapiens
tccgcggaaatgttgtccaaagttcttccagtcctcctaggcatcttattgatcctccagtcgaggttccaaggagcaggggcctcgacaaaggaaggg

SEQ ID NO: 880567 - DNA, 99 bp, Homo sapiens
cctggtccttcctcagatggttgagctggagctacttttcccccaccaactggattctgctggggccgcagcgggggcaaactttctaggcccttctcc

SEQ ID NO: 880568 - DNA, 99 bp, Homo sapiens
cttctttactggaagattcgtcagtgacttttcctgtggtaataatagcatgcatatgcgctagaacttctatttgatcagttgcatgaaggagctaaa

SEQ ID NO: 880569 - DNA, 99 bp, Homo sapiens
ggaccttgccaacctcacgctccgaggtcttgactctcagctcatctccctcaagcgccagggtccccagccccaccccagccccaaaggaggctgttc

SEQ ID NO: 880570 - DNA, 99 bp, Homo sapiens
taggtcgatggtcggcggcgcccggatgggcagctgagagagaaatctcatcatctgtgcagccttcttaaagcaaactaagaccagagggaggattat

SEQ ID NO: 880571 - DNA, 99 bp, Homo sapiens
cctctcttcacattgtagactttttagttcagaacagggctggcgctgtgacaactgccgcagacctgggggtgaacccagtcccgaaggcactactgg

SEQ ID NO: 880572 - DNA, 99 bp, Homo sapiens
caatgccaccattgcagagcatgccccggttggacactgctttctgcaggccctggagagtgaatttgtttcctgccagcttcaccaatggattgatct

SEQ ID NO: 880573 - DNA, 99 bp, Homo sapiens
ctggaattcccatagatatgtggaatgctggtaatcctggtggacctggacctggtggtcgaggaagaggtagaggtcaaggcaactggaacatgggac

SEQ ID NO: 880574 - DNA, 99 bp, Homo sapiens
agatacgaaaaggactattgctgggaatattttctgtcttcaaacacactgcagggtgactgtcgttcctacagttacgtgtgtggaatctccagtaaa

SEQ ID NO: 880575 - DNA, 99 bp, Homo sapiens
tcagtccctaggtatccgcactgctcagggatactgtggcctcatgaataggaatgtctgcccatatgtcaggattggaaataatggatgaagatcaat

SEQ ID NO: 880576 - DNA, 98 bp, Homo sapiens
ggtggccagacgagcagtgaaagccctttggaacctccggagcaatgatacaggattactagcattgatatgaaccatggacaagtatattctgctgc

SEQ ID NO: 880577 - DNA, 99 bp, Homo sapiens
gatcaaccccaaagataacaatcagtttgccagtgcctctttggacaggactatcaagccgagagggtgacctctctgggcaaggactggcatcggccc

SEQ ID NO: 880578 - DNA, 99 bp, Homo sapiens
ccatgaagagtcctgaccacaatggggaggacaacttcgcccgggacttcatgattggagcatatgatcaacaaatatgggaaaaatctgttgaacaga

SEQ ID NO: 880579 - DNA, 99 bp, Homo sapiens
gttgtcataatccacatgctaactcgatatgctcggacacagtttgtcagcccttggaaagaggagtcttttagtcctgctatacagctgcaccttgta

SEQ ID NO: 880580 - DNA, 98 bp, Homo sapiens
atgaaagctcattgactggtgaatcagatcatgttaaaaagtctttagataaggatcccttacttctatcagatagaagaagtcagagatgccatgga

SEQ ID NO: 880581 - DNA, 98 bp, Homo sapiens
acatttagcgcatcatgtgatccggattactacaagggaagacataaattcaaagcaggttgctacagtgaaagcagacctggagtctgaatcttttc

SEQ ID NO: 880582 - DNA, 99 bp, Homo sapiens
agtgggcagatgtaaagagaccggcaaagttcacgtgactgtggatctcaagtactaccggccaactgaagtggaccgtataatagacgctggccccaa

SEQ ID NO: 880583 - DNA, 99 bp, Homo sapiens
ctttcgttggccagaggaattgcagggcactgtgacctttgaagatgtggctgtgaacttttcccaggaggagtggtgtcttcttagtgaggctcagag

SEQ ID NO: 880584 - DNA, 102 bp, Homo sapiens
aacgtaatgaggatgaagattcaccaaataagctatatactttggttacctatgtacctgttaccactttcaaaatagagacggggtttcaccatgttagcc

SEQ ID NO: 880585 - DNA, 99 bp, Homo sapiens
ccgaacggggggagattctgctcacggaactgcagaatgacagcccatatcaaggcggtgtattctttttgacaattcattttcctacagactacccct

SEQ ID NO: 880586 - DNA, 99 bp, Homo sapiens
cctggcaggcacagcacgagagccgcacctttgccgtgtacctcaatagcactggctaccggacagcttggctgaagaggaaataaaaacagaacagga

SEQ ID NO: 880587 - DNA, 98 bp, Homo sapiens
gaatttcatctacgtcttccacacacttgaggccatgtggaagtgttacatcaccttttgcttggaaagatttactaagaagtcaaatagtgggttcc

SEQ ID NO: 880588 - DNA, 99 bp, Homo sapiens
ctgagtgccagtcacccaatggtgggcaagtggctggagaaacaagaacaggtctctaattaacagaagatggcaaagcccagccacagcagctatgtc

SEQ ID NO: 880589 - DNA, 99 bp, Homo sapiens
aaatgtagacaatggttagagaagaattttccaaatgaatttgcaaaacttactgtagtctgcagatctccaggggagcccaccagcctagtcaacatg

SEQ ID NO: 880590 - DNA, 99 bp, Homo sapiens
gtcgatgagcatctcttattttccctttattggcagtagggctttcatcacctttaaaatacggctccacaaacgctttctgcttgactttgtcttgtt

SEQ ID NO: 880591 - DNA, 99 bp, Homo sapiens
gtgtttagacgtacatacaaccctctgcaaaatctttcagtgtagtcctctgtatgaaaagtcaagtatatgaaggacgtctcaccgtatttcaagaac

SEQ ID NO: 880592 - DNA, 101 bp, Homo sapiens
caaaaacttagatttggtctctgcccccatttcctggcacccgacagctcttagaacccccagactctctgaagtggctgaactccagtgcacccagttag

SEQ ID NO: 880593 - DNA, 99 bp, Homo sapiens
gccaatgcccaagacattataaacgcagctgttgtgctgtgtatggacgtgggctttaccatgagtaactccattcctggtatagaatccccatttgaa

SEQ ID NO: 880594 - DNA, 99 bp, Homo sapiens
gcataccccagcgcccggcagttatgtattctccgctctgtctcacccaggaaatgcaacctcaccacaagtacaaagaccatctttcatggactactt

SEQ ID NO: 880595 - DNA, 100 bp, Homo sapiens
ataaagatcaatttatccagcatccaatgctttggagctgccacccgcttcagatgcttcttgggaccacgagcctcttgactataagtgcgtctcttta

SEQ ID NO: 880596 - DNA, 99 bp, Homo sapiens
gatcataaagagacacataccaaattggatctatccaggaaagaccacagcaagattctttcattcgtctcctcctagcctgggggaccaggctcgaac

SEQ ID NO: 880597 - DNA, 99 bp, Homo sapiens
cttccgtatctgcctaggcattttgctgtctcctcctaatacggttatcaatactctggctgaccatcatcatcgtgggactgactttggtggaagtcc

SEQ ID NO: 880598 - DNA, 99 bp, Homo sapiens
tttgggagttgagtgatattgaccatgatggaatgcttgacagagatgagtttgcagttctcttgaatgtcgtctctcaactagccaaacggaatctgc

SEQ ID NO: 880599 - DNA, 98 bp, Homo sapiens
agccatctcttagtccagcaagtcctcatagccaggccctgtatgatgagattcgtcagtttcgcaaggcctgtggggaggctcatcttaaaactata

SEQ ID NO: 880600 - DNA, 99 bp, Homo sapiens
caagagcaacaactatttgggtgtgccattatctacacaatggggacctcaaggctatttctatccaatccagattgcacagtatggattaagtcatta

SEQ ID NO: 880601 - DNA, 99 bp, Homo sapiens
cattcaacgaccaaccagcctccccctgaagattctgccgctgattgctatcacttctgcagaatccagtgggaatcttctgcggcttgtccatagtgt

SEQ ID NO: 880602 - DNA, 99 bp, Homo sapiens
ctaatggtaaccgaaactcaaagttaatggagccaaatttaataaagagcttacaagaccctatgaaaaaattagttgagaaagaagagaagaagaaaa

SEQ ID NO: 880603 - DNA, 99 bp, Homo sapiens
ctgggatccagtacgagttgaatcattgttcaaataagcttggatcctagcatgactatacattgtgacatggtcattacatatggattagaccaactg

SEQ ID NO: 880604 - DNA, 99 bp, Homo sapiens
agtcactggtcccaagaagacctatatcacagatcctgtttcagccccctgtgcgccaccattgcagccaaagcttgtacctccttttaaacctcaagt

SEQ ID NO: 880605 - DNA, 99 bp, Homo sapiens
tttcccttgttcagcttttcagtgtctgctggaatgtgatgaatgtgagcatttgatccgccatatgttggtgttagatcccaataagcgcctctccat

SEQ ID NO: 880606 - DNA, 98 bp, Homo sapiens
gctgagctcaccagggcaggggctacccatgtggagagatgcatgagcaccaaaagtggtctgaagtcagagaagttggtggaacagctcactgaata

SEQ ID NO: 880607 - DNA, 99 bp, Homo sapiens
ggacaacctctttgaaattgtaacaacgtctcgaactttctatgtgcagggcaggaagatcccaacagtttgcgccataaatataactttatcgcggac

SEQ ID NO: 880608 - DNA, 99 bp, Homo sapiens
ggcctcccaaagtgttggaattacagagtccttataggacagttcttcgagataatgcaataccaacaatatttgatcttaccagtcatttgaacaacc

SEQ ID NO: 880609 - DNA, 99 bp, Homo sapiens
gagaacgcctccagcggggatgacacagaagagtgatcagcagctggactgtgccttggacctaatgaggcgcctgcctccccagcaaatcgagaaaaa

SEQ ID NO: 880610 - DNA, 99 bp, Homo sapiens; identical to SEQ ID NO: 816064

SEQ ID NO: 880611 - DNA, 99 bp, Homo sapiens
atggcactctggcgggcataccagcgggccctggccgctcacccgtggaaagtacaggtcctgacagctgtggccagaacgtatttatcagagtccata

SEQ ID NO: 880612 - DNA, 99 bp, Homo sapiens
caagatgtgggcacaaaaactaccattcgcctgatgaactctcagcgccatcatgaccgggtcctataacaacttcttcaggatgtttgatagagacac

SEQ ID NO: 880613 - DNA, 98 bp, Homo sapiens
acgtaggaagaagggcaggacctgggcggaggccgccaagacggctctttggtgtaacgggaaactgcgctgcctgtagtaagctcatccctgccttt

SEQ ID NO: 880614 - DNA, 99 bp, Homo sapiens
gtggttctcgtctcaaactctatttgccaaaggaaacttgccttatcaccttcttgcttgcaggtctggctggctttgcacgcctctgtcctggagatc

SEQ ID NO: 880615 - DNA, 98 bp, Homo sapiens
gaacatgaagccagtcctgacaatgggcagaacgaattcagtgatatcattaagtccagatctgtattagaaaggaagatatccacacgacaaagtag

SEQ ID NO: 880616 - DNA, 99 bp, Homo sapiens
ccagcagctgctcaaagagaagcagcagcgagaggaagagctccgggaaatcctggcatttgatgaagcaattgctgaattggatacgctgaatgaaga

SEQ ID NO: 880617 - DNA, 99 bp, Homo sapiens
ggatcttctcattggccgtggacatggtttctatggcattctccagaggactaattgtggtacgacattttggatggcggtggccgtgtatgtaaaccc

SEQ ID NO: 880618 - DNA, 102 bp, Homo sapiens
caggcatgcagaggaaatcaaacctcagcttaaggatcatagcaccgcacttgactgctatgatccttaagctgaggtttgatttcctctgcatgcctgtct

SEQ ID NO: 880619 - DNA, 99 bp, Homo sapiens
gttccaaagcctcctggaccgtccaagaagcctccggtgtggctgtctctgatggtgtcatcaaggtgttcaacgacatgaaggtgcgtaagtcttcaa

SEQ ID NO: 880620 - DNA, 99 bp, Homo sapiens
caaactcatcggaaacatggcactgttgcctatcagaagtcaattcaaaggacctgcccccagagagatttgtacctgttcaagctaggcctggcccct

SEQ ID NO: 880621 - DNA, 99 bp, Homo sapiens
agccagtactacagaagttaggtcaagatgaagacatggatgtcaaatactttgcacaggaagctataagtggtcatcatcagatttgaaatatttaaa

SEQ ID NO: 880622 - DNA, 99 bp, Homo sapiens
tggaagtgaagaatatgatgttcctccccggctttctcctcctcctccagttaccaccctcctccctagcataaagatattcaccttgcgaaacgtttt

SEQ ID NO: 880623 - DNA, 99 bp, Homo sapiens
accgaggcccccctgaaccccaaggccaacagagagaagatgactcaggctccaaacaggcatgcgaggtgcctttggaaagccccagggcactgtggc

SEQ ID NO: 880624 - DNA, 99 bp, Homo sapiens
tcatggtgatataaaagcagcaaatctacttttgggttacaaaaatccagaccagccagagactgctgctactttgaaacgtacgatagaggccctgat

SEQ ID NO: 880625 - DNA, 99 bp, Homo sapiens
gatgcccgtgtggcgctgattggatttccctctgtgggtaaggctatggagttactagtagagaaagcaatcagcagtgcttctagccctcagagccct

SEQ ID NO: 880626 - DNA, 99 bp, Homo sapiens
agtttcaattgttggatcagccccactttcgggtctgcagccagccggttagggatggtgggggtctgctgatccacacacaccaccttcttcatgtcc

SEQ ID NO: 880627 - DNA, 99 bp, Homo sapiens
aaccgagtctggaccatttagaagacgccggcagctctggacatcctgagcccaagtcccccacactcagtgcagtgatgagtgcggaagtgaaggtga

SEQ ID NO: 880628 - DNA, 99 bp, Homo sapiens
agaagcagtgaccgtgcccacgccaagatctgaaactcagcaccgaggctctgctccccactctgagagtgatctaccagagcaggaagaggagattct

SEQ ID NO: 880629 - DNA, 99 bp, Homo sapiens
ttcgaaaagctgccaagttgaaaatggacgagtaatcgcctgctttgattcattgaaagtcccagtagggatggcacaatcagcgaggacaccatccga

SEQ ID NO: 880630 - DNA, 98 bp, Homo sapiens
cacatggattgttttaaagcaacctataaacatcagctctcaacagctttccagagtgttgaatcttccaccagaaaacttgatcacatcaatatctg

SEQ ID NO: 880631 - DNA, 99 bp, Homo sapiens
cgctgctggggttctgcctggccgagctcagtcaggtctgggttgtgggtctttccatctgggtagaggtaggcctgtaatcccagcactttgggaggc

SEQ ID NO: 880632 - DNA, 99 bp, Homo sapiens
aggagacttccttgcttctttggagaatgatatcaaaccaggacagtatgatttggtgaaatgcctggctcctattcgagaccccaagaccgagcagga

SEQ ID NO: 880633 - DNA, 100 bp, Homo sapiens
ggagtaattcttgaacctcctcttcaagctcaaatgtgggatcgcagttcaacctccctttctgtgacaatgccatagttgggaggttcaagaattactc

SEQ ID NO: 880634 - DNA, 143 bp, Homo sapiens
gacctctacaactgggaggtggccatcttcggaccccccaacaccctctgttcagcagtttgtccagtttcgcaatctccacagctggacccttctgcacctcctgccccttcttttccttgaagtagccgccttcgtagagg

SEQ ID NO: 880635 - DNA, 98 bp, Homo sapiens
ccggtgctgcagaaccagatccgggagcacgtcatcgccatcgaagtaatgttgcaggtcagtggaatccagtttttatgcagcctctgccagaggaa

SEQ ID NO: 880636 - DNA, 99 bp, Homo sapiens
ctctttgacagtgccatttttcaggaaaaagagaacaatagctcaaacaggactcaatactacacctgtttagggtcctgtatgcgctttccacgttcc

SEQ ID NO: 880637 - DNA, 98 bp, Homo sapiens
aggaagtctggacctcagtatattctgcagtacctgtttgcccggagaaataggggagtgggggcccaagaacgagaagacgagaacgcgtcgccctg

SEQ ID NO: 880638 - DNA, 99 bp, Homo sapiens
cggggcctggccgggctgtgagcggcgtatgcaaatcgagggtctcggggatgcggatccaagaccctgggaaggctcagaagtggaaaaatatgaaga

SEQ ID NO: 880639 - DNA, 99 bp, Homo sapiens
gcatggtggtctggggcaacgcggaaggagttcaaagaaggacgcagagccagccacacagccccacaggtcctctttagccacagggaacctcctctg

SEQ ID NO: 880640 - DNA, 99 bp, Homo sapiens
gctgtcgcgccgctgctggttgctgtccctgacacatctgaccttcgggaaggagttcacagaagcggtggaagccaaacaggtggctcagcaggaagc

SEQ ID NO: 880641 - DNA, 98 bp, Homo sapiens
cgaagcccagcccctgatgtcccagcagaaagcatgctctgaattgccatcggatgaagcctgctctgttcagcgtgctctgtgagatcaaggaaaag

SEQ ID NO: 880642 - DNA, 99 bp, Homo sapiens
ccagacaacaggatcgtctcgtccaaggattttgcctaccattttacagtatttgtcttctattttggagcctttttattggaagcagcagccacatcc

SEQ ID NO: 880643 - DNA, 99 bp, Homo sapiens
gtctaagcgctcgcggaaggaggagtggttcccagaagtgcggcaccactgccccagcacacccatcatcctggtgggcaccaagctggacctgcggga

SEQ ID NO: 880644 - DNA, 98 bp, Homo sapiens
agacatgcctgcggccaagaagcagaagctgagcagtgacgagaacagcaatccagacctctctggagacgagaataaaaggcgacggcggattgaca

SEQ ID NO: 880645 - DNA, 99 bp, Homo sapiens
tgaatttctctatgatgagcactaacactgtgggacttggtttgcctatgtcaagatcacaggacatggatttgattgacatactttggaggcaagata

SEQ ID NO: 880646 - DNA, 98 bp, Homo sapiens
caaactccggtattgctataaggaatggaagttggatacactttgtgacttgtacgagacactgaccattacacaggctgttatttttctcaatacga

SEQ ID NO: 880647 - DNA, 99 bp, Homo sapiens
atggaaagcagcagagtttctacaaatgctagaagctatcaaagcccttgaagtcaggcaccacactgtaactcgaggcatcaccaaaggcgtgaagga

SEQ ID NO: 880648 - DNA, 99 bp, Homo sapiens
acccagaattcaaacagatatactaaagcaggctaccaaggacagagtcagtgatttccataaattgaagcaaacctcccctggtgaagacacaaactg

SEQ ID NO: 880649 - DNA, 99 bp, Homo sapiens
gaccattgacaaccagcgagtgtatgatgaaaccacagtagaccctaatgatgaagaggtttcagcagagcagctttaccatttgggctggtgaggcga

SEQ ID NO: 880650 - DNA, 99 bp, Homo sapiens
tgcggtcgaagaaggggacgccgacaagatcaaaggtttggagtggctggtgtccctgtacaacaacaacctgaacggcatcctggccgacgagatggg

SEQ ID NO: 880651 - DNA, 99 bp, Homo sapiens
atgaaagagtagatgaaacttccgatgaccgtccggctggaacgcggagtgtgagagctccggtgacgaaagtccatggcggttcaggcggggcacaga

SEQ ID NO: 880652 - DNA, 99 bp, Homo sapiens
ccatgtcctgttgtggggcttttacagcctttgggagacagctgttgcaatcccttaagcatgggtgctattaaaaaaatggtggagaagaaaatacct

SEQ ID NO: 880653 - DNA, 98 bp, Homo sapiens
gcagatgctccagtttgagaaacctggatctgcgatctgtttgtgtacaacaaacacctcttcgtgcacattgggcatgccaaccattcttacagtga

SEQ ID NO: 880654 - DNA, 99 bp, Homo sapiens
ctttcgaagggaaccattcttccatggacaggacaactatgaccaggggacacttaaactggcttcagctagatcgaagagtattggaacatgacttcc

SEQ ID NO: 880655 - DNA, 134 bp, Homo sapiens
ccagccaatcaacaatgctgacttcatagtgcctatagagattgaggggaccactcaccagattggcggcagtaagcacacaatgaatgatcacctgcatgtcggcagccacgctcacggacagatccaggttc

SEQ ID NO: 880656 - DNA, 98 bp, Homo sapiens
tgtgtgtgtggcaggggttgttttgagtcccaccatcttccatccctgatgcttggagaagctgaggacacacaggcacaggagaaaacgacgctcca

SEQ ID NO: 880657 - DNA, 98 bp, Homo sapiens
caggtccggcgacagggtctacaagaacgagtgcgccttctcctacgactctcccgtgaaaagaaagggattatctcagacagtaagccaggaggaaa

SEQ ID NO: 880658 - DNA, 99 bp, Homo sapiens
ccatgaatttgcattcaggactcagggagtacacacttaccaggagtaaacatggaagtactaacttcattccagaacaatttttggatgacttcattg

SEQ ID NO: 880659 - DNA, 99 bp, Homo sapiens
cagcgctgtcgtgctcctctactcgattctgtcccctctgggacgaattaatgaagcagtgaatgacctcactaaagctatccaactgcagccctcagc

SEQ ID NO: 880660 - DNA, 99 bp, Homo sapiens
gaatttcagctccatgaaccatttcttctgtatagaaatgcaagctgtggccagagaacacagacaaaaagtggaccagttattctagcagatgaaatt

SEQ ID NO: 880661 - DNA, 98 bp, Homo sapiens
tagagccatatattgcatgggggttctgacttattctggagaggagtaggaagtaatatgagcaggaactcttgggaggccagaacaaccaacctgcg

SEQ ID NO: 880662 - DNA, 98 bp, Homo sapiens
tccagcctgcagtctcagcgaagctcacagcaggacccctgcgaggacaaacgtcacaaagacatctggtccaaggagaagacgtgtgaccgcttccc

SEQ ID NO: 880663 - DNA, 147 bp, Homo sapiens
tcgagattatcgtagacggcacagccacagccattctcccatgtctactcgcaggcgtcatgttgggaatcgggacctgctgaagttcccatgatgtcacccaatggatccattcctcccattcatgtgcctccaggttatatctca

SEQ ID NO: 880664 - DNA, 98 bp, Homo sapiens
tgtgacccaaggcctgtggacaggaacccgaaaacagtggccaaatgtcaggtaactcccagaagaaatgttctccaaaaacgcccagtgatagtgaa

SEQ ID NO: 880665 - DNA, 99 bp, Homo sapiens
ggtgtctggactggaacctctgggcccaccttccacagcgcggcacctgtacctccggggtggcgctggggttggctccatgaccaagatctatggggg

SEQ ID NO: 880666 - DNA, 98 bp, Homo sapiens
gtgccttaagagaggatcgcccaatccacatgcttttccaggtacaccagaggatcgcttcctggcagaatttgggagctgtttattgcagcactgtt

SEQ ID NO: 880667 - DNA, 99 bp, Homo sapiens
tattccagctttctcagtatctacaggaatatatgcagaacatgtcctgcggcccaagaatcttggacttgcacatcagaggcaacagcaactacaatt

SEQ ID NO: 880668 - DNA, 99 bp, Homo sapiens
gcaggcaagtttacttgctgtcatcttctgcaagaacagaaactgttcatacttggtgcgctgtggactcttgtgataattaaccaagagtagctctat

SEQ ID NO: 880669 - DNA, 98 bp, Homo sapiens
gaaagacttgtgaatccaggaagagagactgactgggcaacatgttattcagcttccggaagttcaacattctgacttcaaaccagaaaactttgacc

SEQ ID NO: 880670 - DNA, 98 bp, Homo sapiens
ttttatttgcaaagagaaactagggctctccaatgtcagatgtggtcagtagggagctccatgcccaagctcaagaacgactgcaacactactttatg

SEQ ID NO: 880671 - DNA, 99 bp, Homo sapiens
agtgaaatgacatcaagagacctatcaagacctgtatccaggaaaaggctgaccggttccctgatgtgttacctgcttctgctactgatccaaactgca

SEQ ID NO: 880672 - DNA, 99 bp, Homo sapiens
ggtgatggttgcacaacaatatcaatttattttataccactgaaccgtgcacttcaaaatggttaagatgagctgaggcttcgaagacctcagaggact

SEQ ID NO: 880673 - DNA, 99 bp, Homo sapiens
gtgactgagaacttgaagtcagcaaaggaaatttcatctgatttctcttcccatgtgccagaagtaaatataccctgggcgtggtggcaggcacctgta

SEQ ID NO: 880674 - DNA, 99 bp, Homo sapiens
gacgtcggtttgctatcgggactcggcgaggacggctttgatcaagagcccctctcaggatgagatgctccctacatacctgaaggatctttctattag

SEQ ID NO: 880675 - DNA, 99 bp, Homo sapiens
cttgctgtaactttggatgaatggaaaaagaaactggaatctcccaacagagaaattattattttacacaatccaaagactgtaaaaggtggaatttct

SEQ ID NO: 880676 - DNA, 99 bp, Homo sapiens
ctcaccaactgcgtgcccggcgtgctggaccgccgcgactccgccgcgctgcgcacgcccaggtatcctgattggaatcctgagatcctcccatcgaga

SEQ ID NO: 880677 - DNA, 99 bp, Homo sapiens
gattagcttcgcagtctggaaagctttaggagttcacagtgtttatttatgaaacagagcatcataatggcatagcagagttactggaaatattgggaa

SEQ ID NO: 880678 - DNA, 99 bp, Homo sapiens
gagaactacaggaacctgctttctctcgatgaggataacatccctccagaagatgtcctggacgcacaatatccagcgagagaaagagtttctgcggaa

SEQ ID NO: 880679 - DNA, 98 bp, Homo sapiens
ggacgcgcccggcgcccctgagccggccgagcggcgacggaccgcgaggtgtggtcactcacctgtctaccactcccgtgaaatggcagctcgtgcct

SEQ ID NO: 880680 - DNA, 99 bp, Homo sapiens
atcacaatcactgatcttgtaggatctaaagggtccttaactaaattcccaatgagcgctggatacttcagtccatgttcctggctagcagctgtaatt

SEQ ID NO: 880681 - DNA, 99 bp, Homo sapiens
gtagatggtgatgccagcatcttatgtacacttttggggttttccagccaagcacagtacatctcctccacatagttcgaactagtcccactgagaaag

SEQ ID NO: 880682 - DNA, 98 bp, Homo sapiens
ctgcaggaactctacaacccaatccaggccctcaagagtattgagtatctggaggaggatgcccagaagtccgcacaggagggggtgctgggaccaca

SEQ ID NO: 880683 - DNA, 98 bp, Homo sapiens
tatgacaagaccaaggtcaacaaggacaacaatgagatcgtggacaagatcatgggcaaaggacagatccagctgcccaacatgttcggcgaccttcg

SEQ ID NO: 880684 - DNA, 99 bp, Homo sapiens
ctctgggcagggtccaagtgctgccactcctccttgctgaagtccacagtcacgtcctcaaatgacactgaagcattgtttctccagtcttggctacat

SEQ ID NO: 880685 - DNA, 99 bp, Homo sapiens
gctgacggccgccaagaagcacggcaccaaaaacaagcgcggggtcgggccccggctcagtggtcccaggcagctcgggtgtcggaacccccagacagt

SEQ ID NO: 880686 - DNA, 98 bp, Homo sapiens
gcggcggcccaggccagcattcccgcaagtccggcagcgtcttctcttgagggagcaatttggagaagagctggaacccagactcgcgccctggatgc

SEQ ID NO: 880687 - DNA, 99 bp, Homo sapiens
ctcctgcttcttatagttggacaccaccacgtactgttccaggatcatgggctcggcggtggcgtcggcacgggtagtttcttgagcagtcactggagg

SEQ ID NO: 880688 - DNA, 98 bp, Homo sapiens
ctgtccctgcggcttctggggaaacaaagggtcatcctttctagaaagagaaccgctgtgctatcaggagggaaataatccaagtgccaaagaggcca

SEQ ID NO: 880689 - DNA, 99 bp, Homo sapiens
tggcagcatccactcggaaactgcttcttcagctcaaacaagaggatttatggttggtagagagtatgaagctgaaggaattgccaaggatggtgccaa

SEQ ID NO: 880690 - DNA, 99 bp, Homo sapiens
tgttggacctttatacgtattgtaaagtaagcactatcctttgtactccctcaacgtggcctccatgtggttgaagctagggagactctacatgggcct

SEQ ID NO: 880691 - DNA, 98 bp, Homo sapiens
ttgaattagacccgtttcctatagatgagaaaccatacaagctgtggacacattcagctaacgtattttagcaggtggagtgaggttgaagattcctg

SEQ ID NO: 880692 - DNA, 98 bp, Homo sapiens
tcggagctagagccagaggtgcaggccatcgaccggagcttgctggaatgttcggccgaggagattgcggggtttgaagatggcatcctggacacttg

SEQ ID NO: 880693 - DNA, 98 bp, Homo sapiens
tctctggattcaagtcccaggagtcctgaccagagagcagacctgtcatttactccatcctttatagtgatgctacaggacgaagaggaatggataaa

SEQ ID NO: 880694 - DNA, 99 bp, Homo sapiens
gatgctaatttgggaaaaagctccaggattctgacagggatgttgcgaagggggtggcggatacagtggagcatcgtgcccgaagtgtctgagcccgtg

SEQ ID NO: 880695 - DNA, 99 bp, Homo sapiens
tcagcaccgacagccgacgcgcagatagcagagccatccttgggaaattccgggtagatatgcctggctcaggcagtgcattcatccccaccatcaacg

SEQ ID NO: 880696 - DNA, 99 bp, Homo sapiens
gtttggctggtttaatacaccatcctttccaaaaatggaacccaaaagaccaaatcctcgaccccatttggccacttgctgccccatcattgtatcacc

SEQ ID NO: 880697 - DNA, 99 bp, Homo sapiens
tccaagccaaaatcacagctttgagtgagaaacagaagtttcaggcacctgcaagagagacctgcgtggaatgtcagaagacagtctatccaatggagc

SEQ ID NO: 880698 - DNA, 99 bp, Homo sapiens
ggaggccttggaaagagactctgcgtcaggtcacccagcagagatcagcaatccttggctcactgaggaggtttgagcccccctccatgcgcctgaagg

SEQ ID NO: 880699 - DNA, 100 bp, Homo sapiens
aaggttgcattgatgaaattaaagatgcatgctgatgaagcacactgtggtaatgacttatcgccatcagcatgcatctttaatttcatcaatgcaacct

SEQ ID NO: 880700 - DNA, 99 bp, Homo sapiens
aacaagaaacttctacagagcaaccactcaccaactctcagcgttctcatctctcttccttcaccatgaagctgatggacaaattccactcacccaaaa

SEQ ID NO: 880701 - DNA, 99 bp, Homo sapiens
agataagcaatttaaagaaaattttaaaaggaatcttggattataatcatgagctgttcgggggtcttgtctggattttggttgcctcctccaatgttc

SEQ ID NO: 880702 - DNA, 99 bp, Homo sapiens
gcctctgggcaaactgttttggaaaaagaaccaccaccacctaaaatccccaaaattgagaccactcatccaccgttgcctccagcccacccacctcca

SEQ ID NO: 880703 - DNA, 98 bp, Homo sapiens
tttctttggcatcactgcagctagtaatttgccttctggattaggatcttcaaatgcttccttgaaagaagaagaatgtaaagagcctttgctcttcc

SEQ ID NO: 880704 - DNA, 99 bp, Homo sapiens
ggagcgaagagctgcttctgtatcttaaggtcctactgctctgttggctcatgaaataggttttggaagtaaagttacaacacaccctcttgctaaaga

SEQ ID NO: 880705 - DNA, 99 bp, Homo sapiens
ggccaggcctggaaactgcacacctcttctggtcactttccgctcccagaagctgtcgctggacacttctactccaacggaatcatcatatgtgacaga

SEQ ID NO: 880706 - DNA, 99 bp, Homo sapiens
aggcggcctctctggcagcagacatcagccacgcatctgaccttgttgggttgttgggggctttgacgtactgacagccatggagaatgtggagagtga

SEQ ID NO: 880707 - DNA, 99 bp, Homo sapiens
gccaacagcaccatcattgcatttacctcggatcatggcctggttgcagtatgcctgaaatttgggatgtagaagatcctgccaatgctgggaaaactc

SEQ ID NO: 880708 - DNA, 99 bp, Homo sapiens
tctcgctccgtggccttagctgtgctcgcgctactctctctttctggcctggaggctatccagctgcagggacttcacagcccacacgggctacgaggt

SEQ ID NO: 880709 - DNA, 98 bp, Homo sapiens
ggaggccctgcctgctcacagcggggcgcccctgcttgtggaggagaatggcgccatccctaagtgcccatctaccctgggagaggagcgctcctaca

SEQ ID NO: 880710 - DNA, 98 bp, Homo sapiens
gcaaacagtacggcagtgaggggtttcgaaaaaacgatgaaatgaaagctatggatgttttaccaattttgaaggaaaaagttgcatacctttcaggt

SEQ ID NO: 880711 - DNA, 99 bp, Homo sapiens
ctcccaagtagctgggactacagtcttgactcgtctgctgaacaaatcctctgacctcaggccggctgtgaacgtagttcctgagagatagcaaacatg

SEQ ID NO: 880712 - DNA, 99 bp, Homo sapiens
gaccactccacgatgctatgtaggggccacagtgcttcgggggagactctatgcaattgcaggagcttttgcaggagccactgtccatgacttcttcaa

SEQ ID NO: 880713 - DNA, 99 bp, Homo sapiens
aagatgaagcaaaagaacaaattcagtcccttctccatgaaatggtacacgcagaacatgggaccagttactctccacaagaaaattcacacaaccaca

SEQ ID NO: 880714 - DNA, 99 bp, Homo sapiens
ctttgccttcagcctctcccaggactgggagctccctgcgaagagagagcaccatctacacttcgcccatcaaggccctgagcaaccagaagttccggg

SEQ ID NO: 880715 - DNA, 99 bp, Homo sapiens
cagagattctgcaaatgcgacaagcctcccagacctacaacaagaaaggggcctcccgaaggaaagaccacctgaaggaccaccagaatgggtccatgg

SEQ ID NO: 880716 - DNA, 99 bp, Homo sapiens
gaccactgcctgtgtctcgtcttgtatctctaattggaagcatgggaccttcgaacttttcatcttttgcatactgttcccgctctggatcagtgtcgc

SEQ ID NO: 880717 - DNA, 115 bp, Homo sapiens
gctggagctgggtcagtccgccgctcaccccgcggccaaggcagggtacatttctgcaaacctgtggaagtcagctgagaaggcgggaaggtgcggccgcggggtgagcggcgga

SEQ ID NO: 880718 - DNA, 99 bp, Homo sapiens
ggacaagatggtttacatctcgaacgggtctccaactgaattccttgaagagaaaatggcctaccaggaatacccaaatagccagaactggccagaaga

SEQ ID NO: 880719 - DNA, 99 bp, Homo sapiens
gaagtttcttcagtccctgatcagatcagaggaggatcagtgaatgcttgtgaaaagacctcatttatgtttctgcggcaagagttgcctgtcagactg

SEQ ID NO: 880720 - DNA, 99 bp, Homo sapiens
ggacccgcaagcatgcccaccactgccacaaacgccgcaccaggtcttgtagcagcgcctcctcggaacagcgacatctcactcatgaaaatgtacagc

SEQ ID NO: 880721 - DNA, 98 bp, Homo sapiens
ctaactacaagagcaagatcttaaggcttctttgtacagtgcttgaagtagaaaatgccatgatgagaaaaactattaaaaaacaggatgaccaaatt

SEQ ID NO: 880722 - DNA, 99 bp, Homo sapiens
atgcagagccccagctcctgtctggtctgtgagatgtcctcactgtttcaggagctctgtgcagtgtgcctagaagacttcaagcctcgagatgagttg

SEQ ID NO: 880723 - DNA, 99 bp, Homo sapiens
gcagaccttctgctcttcccagaccaccagtaacacatcccgttatgccgctgcactctacagtgtgaccgcaacaagggaaaacatggcttatactgt

SEQ ID NO: 880724 - DNA, 98 bp, Homo sapiens
tttaaaggagcagccctggtgtcacctatcagtaaaagttatctaaatgatctggatagaatatcccagtctaactacattccaactcagcaagatgt

SEQ ID NO: 880725 - DNA, 99 bp, Homo sapiens
aaataatgacatgtcatgaagtgtcaaaatccgctgtttccttcctcgctgctgacgaggttgctcctcttgagggtatttaaagatgtcctgaaaaat

SEQ ID NO: 880726 - DNA, 99 bp, Homo sapiens
cccttctgaatgagacagaatcagtattgtcatatcttgataaggagtatcctttgggtgcagtgagacaccaggagagctgctgctttgggggatgga

SEQ ID NO: 880727 - DNA, 99 bp, Homo sapiens
ttctactcagctgatattggaacatgcagggtcctattttgacgttggggaagcgcctggaatttgggaagccgccttcacacatgtcttcatcgccgc

SEQ ID NO: 880728 - DNA, 98 bp, Homo sapiens
ttccactactgcacagtcaaggaagaagtgggctgaagaatttaatgatgaaactaatgtgaggtggtgaaaactattggcttgagggaagtttggtt

SEQ ID NO: 880729 - DNA, 99 bp, Homo sapiens
ttcatacagcaggtttggcatgtcgagttatggatccaacaaagattctgataactggcaaaacaagaatccagactccaaaatgatgcaaatcaacct

SEQ ID NO: 880730 - DNA, 98 bp, Homo sapiens
cttactaaccacgaccatcaaatccgtgtcggagtccttacaggaagtcaccatggacaggccacacagaaattacagggagctatggttcttcacct

SEQ ID NO: 880731 - DNA, 99 bp, Homo sapiens
ctcctgagtagctgagattacaggttcaaatggtgaaagacgatgacccctcctggaagcccacttttatcgtgaaacctgatggtggttgtcagggtg

SEQ ID NO: 880732 - DNA, 99 bp, Homo sapiens
gtactacgagacgtgtgctacatacgggctgaatgtggagagggtcttccaggacggtgtggatgaggtcaccattgtcaacattttgaccaaccgcag

SEQ ID NO: 880733 - DNA, 100 bp, Homo sapiens
gttgacctgaccatggacgacattcgaaggatggaagaagagaccagctgtctcttcgtctcttcttccatccttcgaatgtcgtccatggtcaggtcaa

SEQ ID NO: 880734 - DNA, 99 bp, Homo sapiens
tattgatctccatacaaatgttgccactgctgttttagaacatataaagtcctaaagaatattcttacatataataaagaattcccatttgatgttcag

SEQ ID NO: 880735 - DNA, 99 bp, Homo sapiens
aagaagaagaaaccgttcctagggatgcccgcgcccctcggctacgtgccggggctgggccgggggtgctacaagaatacacaagtgatgacatgaatg

SEQ ID NO: 880736 - DNA, 100 bp, Homo sapiens
acctatttgggaaaatatgtcaataacctgaacactgaccagctaagtgcaactgagagctggtcagtgttcaggttattgacatattttcccaaatagg

SEQ ID NO: 880737 - DNA, 99 bp, Homo sapiens
ggcagatgagcagccctttgatctctgctttgggggccgaaggcagttctgcaagaggagctattctgatcttgcaggtctgccaaggtcccagagcga

SEQ ID NO: 880738 - DNA, 99 bp, Homo sapiens
aggcttcgggaagcagatagcatagctgctgtggctgaactacgacaacacattgctgagcttgaaatccagactaaatgtgttaaatgggcttgccaa

SEQ ID NO: 880739 - DNA, 99 bp, Homo sapiens
tgcgccaaatttggtgcctggagtaggagatggcgttcaggaagtggcttatattcactcaaaccagaatgtaattggatcgagcaaagctgaaaatca

SEQ ID NO: 880740 - DNA, 99 bp, Homo sapiens
gatgaagaagatccttcaaaattaaaagaggagcagcatggcatttcagtcactggtttgcagagtccaggtcctactgctctgttggctcatgaaata

SEQ ID NO: 880741 - DNA, 99 bp, Homo sapiens
aaccggaaagtttgtaggaaaattgctgcacatggcctttgcagaaaagagagtttagacactctgcaatatcaccaaaaagttcgctgcatagaaaat

SEQ ID NO: 880742 - DNA, 99 bp, Homo sapiens
gatggagccagaggaatgcctggacaaactggccccaaggcttttcatcttataaaagctgtgtcagtgttgctgaacttttcccaagaggaggagaac

SEQ ID NO: 880743 - DNA, 99 bp, Homo sapiens
tgccacagcatcctccagcacctcaggcaggaaactgcatatcttctggtttacatgaagatggagtgctaatggaaatgcccaaaaccttcagagatt

SEQ ID NO: 880744 - DNA, 99 bp, Homo sapiens
attctcaatgagagcctcacagacccagccatcgttaagcaaatgccagatgttaatgtaagctgggatggagagggcccaaagcaactgccatttatt

SEQ ID NO: 880745 - DNA, 99 bp, Homo sapiens
gctcttccccacctgcccggtgcccgaggaggcagccaagctcgtagcctgccactccgtgcctctggccaggctgccgcacctctacaggaactttgc

SEQ ID NO: 880746 - DNA, 99 bp, Homo sapiens
attacagagaaaaaaccaacaccttcctgtgcagtcctgttggaattttgatgctattgctgagattagagccatttgtattgaagaaattggagtatg

SEQ ID NO: 880747 - DNA, 99 bp, Homo sapiens
aagggtttccgcaatgcccctgtttactgagatgatgaggaacgtggagctggccccggaagtggatgtcggcaccctggagccattgctttctccaca

SEQ ID NO: 880748 - DNA, 98 bp, Homo sapiens
tggatttggttgcagaccaggttctgaatcccatgctgggcagatttataatcgcttagatacaaattgctgtggattcagacctcgcaaggaagatg

SEQ ID NO: 880749 - DNA, 99 bp, Homo sapiens
gaagaagaggaagtagccaaagagcaactaactgatgctgacaccaaagatgctgcacttaaaaggatgcttgttttgatgtcctgctcattgttttcc

SEQ ID NO: 880750 - DNA, 99 bp, Homo sapiens
tcgtgaccgagaccgtgaccgagagcgtgaccgagagcgcgaatatcgtcatcgttagaaggtgaaattcgatgctactgtgatgctgcccactgtgta

SEQ ID NO: 880751 - DNA, 98 bp, Homo sapiens
aactacaggaacctggagtctgtggatggtgtcctcagaccgaagccaactttcctttctgcccacagaagctcaagcccaggtgtcgccgccacccc

SEQ ID NO: 880752 - DNA, 99 bp, Homo sapiens
cagagatttgttcttgtaacttttcaggcgaaagttctcttttcctggggtggtcatgatttcgcaaggtgtcgagtacattctttgaaagccaactct

SEQ ID NO: 880753 - DNA, 98 bp, Homo sapiens
ggagagtgacccagcctaccagcaataccaggatgccggtcaaaaccgctttccgggatgccgctgcaaagcacagtgcaacaccaagcagtgcccgt

SEQ ID NO: 880754 - DNA, 99 bp, Homo sapiens
caactgctccttgtccctgactccgcgacaatgcagatcttcgtgaagactctgactggtaagaccatcaccctcgaggttgagcccagtgacaccatc

SEQ ID NO: 880755 - DNA, 99 bp, Homo sapiens
atgggaattgtgcaccgagatctgaaggttttgatacttatagaggactcccttcaatttccaatggaaattatagccagctgcagttccaagctagag

SEQ ID NO: 880756 - DNA, 99 bp, Homo sapiens
attggcaagctacaataatggggccagttcaaaccttgtactactcagctgatcacaagctgcttgatgggaacctactagatggacaggctgaggtgt

SEQ ID NO: 880757 - DNA, 99 bp, Homo sapiens
gagctttgacatctttgaagatgaaggattaattacacaaggtggaagcgatccagacatttaatgtggatgcaccatgccagaccgtggaagatttaa

SEQ ID NO: 880758 - DNA, 100 bp, Homo sapiens
ttccatttctcagtcatcccccagcatgtacaaaccccagtgagtctgtcacagtcacaacatctgagctgtagctgtcagtagatgactgagaaatgga

SEQ ID NO: 880759 - DNA, 98 bp, Homo sapiens
aacccagagcttctgcagcacatctaccagccactgaacctgaccattggggtcacggtgtttgccgtggggaagcgcagacggggaagcggagccaa

SEQ ID NO: 880760 - DNA, 98 bp, Homo sapiens
ggaggataaaatttggagcaagattctcaaggaagcaacaagatcctaaggatttgtactgtgttcgcagtgacctggggaacctgctcaaagccctg

SEQ ID NO: 880761 - DNA, 99 bp, Homo sapiens
ctcaattacacttcgactctcaaagcaataccaggatagctgttgtttcagagaaagcagctcccccaaaggctgtgctgaaactcgagccccagtgga

SEQ ID NO: 880762 - DNA, 99 bp, Homo sapiens
gcaggcatcatccgctatgcaattgggcctgggttactaggtgtctttcagaagctgattgcatccaaagcaaatgaccaccaaggtttttatcttcta

SEQ ID NO: 880763 - DNA, 99 bp, Homo sapiens
gtccaagtcccggaagatcgcgatcctgggctaccggtctgtggtgcacttgcaggaaagacatggtgaagatttcaatggatatctttgtgaggaaat

SEQ ID NO: 880764 - DNA, 99 bp, Homo sapiens
ccccattttcagctcatgaatgaattcctgaggtgagatctgtcggcttctcttaagacttccttacgctttgaggtacctgacagttccaaaacagct

SEQ ID NO: 880765 - DNA, 98 bp, Homo sapiens
ccaaacatcaagcagaatgtgatttgcttgaagatatgagaaaccaccaagttttatatgacagagataattattcagtcatctgagaggagttttcc

SEQ ID NO: 880766 - DNA, 99 bp, Homo sapiens
tctcacaggattcttctttgcagcaaaaactccacttggagatgttggcagaccagccacgaacaactaaataccacagtgtcatcctgcagaataaag

SEQ ID NO: 880767 - DNA, 98 bp, Homo sapiens
agaaggcaaagatgtcggagcgaaaagtattaaacaagtcagctggggagactctgtgaaagtaatgaaggtcatcaatgcggagagaccttgagcca

SEQ ID NO: 880768 - DNA, 99 bp, Homo sapiens
gcctgagggtccctcatggagggagcaccccagggccctgtggcatgaggaagctgggggcatcttctccccagggacagtatggaaattaccagcagt

SEQ ID NO: 880769 - DNA, 100 bp, Homo sapiens
gcagagcagcctgagcgcaagatcactcgcaaccaaaagcgcaagcatgatgcatgcttgcgcttttggttgcgagtgatcttgcgctcaggctgctctg

SEQ ID NO: 880770 - DNA, 98 bp, Homo sapiens
tttgcctctggttcagctcatacaacagcttcttagttggttgaatctggcgatgtggaacccatggatatggagggctgactatatacaccatgttt

SEQ ID NO: 880771 - DNA, 99 bp, Homo sapiens
agtaaacctgaatctttggagtaccattttgttctaagagagttgacaatgcattcgcagatgcctggaaaacttcctttgatgaagaatgcatcagca

SEQ ID NO: 880772 - DNA, 99 bp, Homo sapiens
gactctcttctgactctacgatagatattctttaccagcttggaacaactcaggatcctggtacaaaagacaggaccatctgtcgttcgttaccatctg

SEQ ID NO: 880773 - DNA, 99 bp, Homo sapiens
gggcgtaggaccctccgagccaggaaataacatcaagatttgtaatgaatcagctagcagaaaataaccctttcctaatggatgacatagaacggtacc

SEQ ID NO: 880774 - DNA, 99 bp, Homo sapiens
caacaagagcgaaactccatacgaaatagttgattctcttcttccaatttcttttcattcatggaaagggaaagaagacacattgaattaagcatccaa

SEQ ID NO: 880775 - DNA, 99 bp, Homo sapiens
gtcagatttataccaggagacttacatcgatgaccttggacacctccatgttatggacacggtctttcttattcagagactgaattcccttcaggagct

SEQ ID NO: 880776 - DNA, 99 bp, Homo sapiens
ctctggactccagcccccagaagtcggcgcggcacggcgtgacctgcgcagtggcgtccgttattgatcgtgtcctgtgctgaagatgtttccggaaca

SEQ ID NO: 880777 - DNA, 99 bp, Homo sapiens
gcatcttttagggatcagcctgtgttttttaggagttaaataagattactactcagttggatcaggtcactgcaaagttacaagacaagcaagaacatt

SEQ ID NO: 880778 - DNA, 98 bp, Homo sapiens
ggtgagagccacagaagttccccttagctgggacagtttcaacaagggtgactgcttcatcattgaccttggcaccttccaggaaacacttctacccc

SEQ ID NO: 880779 - DNA, 102 bp, Homo sapiens
ggcctccccagccatgtggaactgtgacattcccagaacctggaggccaggctatgacacagagtcaatcaataaccagggagatctgtgatatagcccagt

SEQ ID NO: 880780 - DNA, 99 bp, Homo sapiens
atggatctacattataccaataacgagtatcctagaaggaaaacatcaccatggctacagaaattggttctcctcctcgttttttccatatgccaaggt

SEQ ID NO: 880781 - DNA, 99 bp, Homo sapiens
gaaggaaaagacagtgtagtcctgcaaaacattttgaggtgaaatgacaatggatgctctgttggctcgattgaaacttctgaatccagatgaccttag

SEQ ID NO: 880782 - DNA, 99 bp, Homo sapiens
cacattgccaagttatgcagccttaaacgacttgttctctatcgaacaaaagtagagaatgctgaaatttctgtctttgaagtaaatatacgctttgtt

SEQ ID NO: 880783 - DNA, 98 bp, Homo sapiens
gaagacatgacacttacaagatggacagggatgataattgggcctccaagaaaacatgccaagggacaagtgttatttgacaaagtgtgtgaacacct

SEQ ID NO: 880784 - DNA, 99 bp, Homo sapiens
caaaggcattcatcatagaaagcttaagtataaggatgcatttatgaaagcaaatcctggctacaaatggtgtcctaccacaaacaagcctgtgaaatc

SEQ ID NO: 880785 - DNA, 99 bp, Homo sapiens
gaccatgaggaaatgagagaaatgcttacacacagaaatgaaatgggacgtcggtcatcagatactgaagaagaaagcagaagcaagagaaaaaagaaa

SEQ ID NO: 880786 - DNA, 99 bp, Homo sapiens
cacgtgtcgctgcctcccaggttaaggggaaatgactttcgcatagattcctcggtagtccagggcaggagcctgtgggacctcctctgcatatacttc

SEQ ID NO: 880787 - DNA, 99 bp, Homo sapiens
cccattgtgtatgcttgtctaagctgtcgaactgatcctcattcggtcacttcagtggtgccaaccgcttcatacaggaaaaaacaaccaatccgtccc

SEQ ID NO: 880788 - DNA, 145 bp, Homo sapiens
gaagggctgagagaggatgtggaagccaatggaacacagccagcgcaggaggcaagattttgaaatctatgcttgcctgggaccagtggcagggaccccggaacctgaaggtgctgacaaagatgacctgctgctgttgagtgag

SEQ ID NO: 880789 - DNA, 98 bp, Homo sapiens
tactgctccccagcctaaaccaattgctaagaagcctcgaacgccaacctctggtccagtaatcacgaagctgatctttgcaaaaccaattaatagta

SEQ ID NO: 880790 - DNA, 99 bp, Homo sapiens
ggcttgttcttactggccctgagtctttgggggcagcctgcagaggctgcgattatgtctggccactacctagatatttgtgccccgtctggatttctt

SEQ ID NO: 880791 - DNA, 99 bp, Homo sapiens
ttcaatgtgtcctacaccaggcagcccccaaatcccggcccagtgcttagaagaaatgaaacgggaagccaggactattaagattgatagaagattgac

SEQ ID NO: 880792 - DNA, 99 bp, Homo sapiens
ggccatccacacggaggtcttccaatataaatctgtccacaaactctatagttcacacgatgggctgtccgtctttttaagggaatacaccttcattgg

SEQ ID NO: 880793 - DNA, 99 bp, Homo sapiens
ccccttccagctcacagtggagaagctggagatggccctgagagaagctcactctgaggaagctgatccagttcgggcttatgaagaacctcatcaggc

SEQ ID NO: 880794 - DNA, 99 bp, Homo sapiens
aggagctgaaagaacatggtccagaaaacattgtaatggccatcgctggaaacaagtgcgacctctcagatattagacccaacatgagtgaagtttcct

SEQ ID NO: 880795 - DNA, 99 bp, Homo sapiens
tcaggagccatagtacctacagcagcactccaggctcatgcacaattagttcgagaagttgatgtggagaaggtgtctgcttttgagaatccatatgta

SEQ ID NO: 880796 - DNA, 99 bp, Homo sapiens
agaggccgaactcgggttctgacaagatggccgggctgccccgcaggatcatcaaggcacattgcaagcaacccgtgccttgatggtggttggcatcct

SEQ ID NO: 880797 - DNA, 99 bp, Homo sapiens
gcgggttaacaacaccttttgccaagatacgtttgaaatggtttctgaagatgaagatgggaaattgggatttaaagtaaattaccactacatgtctca

SEQ ID NO: 880798 - DNA, 99 bp, Homo sapiens
tctttctcagcaccttggcgaagccttgggtttctttcttaaaggactgatttttagaactccacatttgagacctctgtgagtgaaagccttcagagg

SEQ ID NO: 880799 - DNA, 99 bp, Homo sapiens
ccagctcagagaagcctgtataaagatgtcatgatggagaattatggaaacctggtctcactgggtgctggagaatctggtaaaagcaccattgtgaag

SEQ ID NO: 880800 - DNA, 99 bp, Homo sapiens
ccggaggtgcccacgcagctgcctggacaaatggactcaccctgtcacccaggttggactgcactggcctcaacctcctgagttcaagtgatcgtccca

SEQ ID NO: 880801 - DNA, 99 bp, Homo sapiens
acctgcattctcgaaaacttgttagctttacattgtcaggaagtggagagactgattttggacctcagctcaagaacctcaataagaagctcttcacgg

SEQ ID NO: 880802 - DNA, 99 bp, Homo sapiens
tttttggatccaacaaaaacagaccagaagattaccaaggttacacgcatggggagatactctggaggaagcatttgagcaatgtgcaatggccatgtt

SEQ ID NO: 880803 - DNA, 99 bp, Homo sapiens
attggaaagaagactcccatcgcagttcggttctccactgttggggaaaatgtagccaacatatacaaagatcttcagaaactctctcgcctctttaaa

SEQ ID NO: 880804 - DNA, 98 bp, Homo sapiens
gaagaatcagatcagaaagctcaagtcaatacttccgatctgaatgaagagcttggacagtttttcccaaatggatatgccttcgccactggctctga

SEQ ID NO: 880805 - DNA, 99 bp, Homo sapiens
acatggcttctgacagggaaggaaccaagattcaactggcagtttcccacatgggtgtactcgtgttccaggtgcccaacaaccagcatgtgaaggtgc

SEQ ID NO: 880806 - DNA, 98 bp, Homo sapiens
tccaagctcttcctgaacgaagtggccaagaaggagaagcagctgcggaaaatgctagaaggggccagtgtcattcaaagatgtggctgtggatttca

SEQ ID NO: 880807 - DNA, 99 bp, Homo sapiens
tggacgccgccgaagaagcatcgttaaagtctctcttcaccctgccgtcatgtctaagtcagaggagcttgaaattgtaattggagatgagcacatatc

SEQ ID NO: 880808 - DNA, 99 bp, Homo sapiens
gtcctggaagcagaaggagtctttgaaaaagaactgtaagagtaaatgggtccagtaattggaatgactccagataagagagctgaaaccccaggagct

SEQ ID NO: 880809 - DNA, 98 bp, Homo sapiens
aaaacttcactttcttcattcacaatcccaagcgccaggaccttgaagttgagacttaattcagtgcacaaatgagatgaatgtgaacatcccacagt

SEQ ID NO: 880810 - DNA, 100 bp, Homo sapiens
actgcatgtatttgtgttgttactgatgcagagatacttggtcacctatgtagactcttttgctgtatctctgcatcagtaacaacacaaatacatgcag

SEQ ID NO: 880811 - DNA, 99 bp, Homo sapiens
ggcgctccgtgcgcggagccgtctgcctgcatctgctgctgaccctcgtgacacgagacgacttcctgggccaggtggacgtgccccttagtcaccttc

SEQ ID NO: 880812 - DNA, 98 bp, Homo sapiens
gttattctcgttcaagttaatccaggtgagactttcacaataagagcagaggatggaacacttcagtgcattcaagaatgacagggagagagtttttc

SEQ ID NO: 880813 - DNA, 98 bp, Homo sapiens
tccatgacaattgaggcgcccatcaccaagttgtccagtggagccccaaaatagaagcaagatgaatattccattccgcattggcaatgccaaaggag

SEQ ID NO: 880814 - DNA, 99 bp, Homo sapiens
cgggagaaaacaagtccaaggatgaatcccagtccctgttacgggagttaaagttcctcgtaattttcgcttgttggaagaacttgaagaaggacaaaa

SEQ ID NO: 880815 - DNA, 99 bp, Homo sapiens
gacaaaataggaatatttccaatttcatatgttgagctctttcagtctcacatggcaacgaaaacaacttgtatgtcttcacaaggatcagatgatgaa

SEQ ID NO: 880816 - DNA, 98 bp, Homo sapiens
ggaatgtgatcacagagcctatttacccagaagtagtccatatgcttggttctacagccattgggatccagacatcagagggtgtgtgcctagctgtg

SEQ ID NO: 880817 - DNA, 150 bp, Homo sapiens
gtttctttacagtaatttcaacagaagagtgagagatggaacccgaagaagaaaggattcgttacagccagagattgagctacacccccacggtgtttgagcggtacatggtcaacctgcaagtgaaaggcaaacctgtgcacctccaca

SEQ ID NO: 880818 - DNA, 100 bp, Homo sapiens
acctctaacaaagtgaggatccacactgtctaggtcaatatctttaggtagaaagacatcatcttctcaaaaatgcgatagttcctcactttgttagagg

SEQ ID NO: 880819 - DNA, 99 bp, Homo sapiens
cagatttggaggcactccaggctgaccaggggtcattgccactgccaacctgtgtgtaagtgcaattcttctttttacatttgccacatgtgaacaagt

SEQ ID NO: 880820 - DNA, 98 bp, Homo sapiens
gcaggcctgggaatttccgtcccccaccaagtccggatgctcactccaaagtctcagcagttcctccgtgtcacaaagcagtacctgccccacgtggc

SEQ ID NO: 880821 - DNA, 114 bp, Homo sapiens
tctcgcccacctctacccggcagcgggggcagtcagagcggagccaagatgcgaatggggatatgttcaaggaatgagtgatttactttcccctcttttatatgtgatggaaaa

SEQ ID NO: 880822 - DNA, 98 bp, Homo sapiens
agtgtttcagatgacaatgctccctctccttatatggtgttcagtgtgaggtggagctgatagagtccatagaggacctgagacaacctgggaagttc

SEQ ID NO: 880823 - DNA, 99 bp, Homo sapiens
gtcatgacaagaagcttcaaccgaggaggaacagcctgcagagcggtgatgtagttctccagggccaggcggcggcggtcattgagcatggcttccact

SEQ ID NO: 880824 - DNA, 98 bp, Homo sapiens
agaggtggaggcgctttgaaaggtggctattatcatggaaaactaatttttcccagagaatttcctttcaaacctcccagtatctatatgatcactcc

SEQ ID NO: 880825 - DNA, 99 bp, Homo sapiens
gccatagcaaaagcctcatcataagataaccagacgagctgtctctgctctctcttcatcagctcctgccttaaagatgttaacaggtgcaagggaaag

SEQ ID NO: 880826 - DNA, 99 bp, Homo sapiens
gatcaacttctctgacaacctaggccgcccagagcccccggccaggcacccccagggaaggctctggtggagaacctgtgcatgaaggccgtcaaccag

SEQ ID NO: 880827 - DNA, 98 bp, Homo sapiens
atcctatccatatgaggcaacaggcaagtgtccagagaatggctgggatgaaagtacacttgaactctttttacatgaacttgcaatcatggacagca

SEQ ID NO: 880828 - DNA, 99 bp, Homo sapiens
gcaccccaattctcgtctcgggattcttgtctaacatcttcaggatcaggtccttgagctcctcgctgatttctggcctcagcctcccaaagtgctggg

SEQ ID NO: 880829 - DNA, 99 bp, Homo sapiens
catcgtcctgtggacgcgtatcgccagcacgatcccaccgcacgttcagaagtcgggcatggctaatgtaaaagcagccccaaagataattgacacagg

SEQ ID NO: 880830 - DNA, 99 bp, Homo sapiens
gaaattaagcctttgcaatttgaaattatgattgacagacttgaaaaagccagttctaatcaggttcaggagctccatgaggaggaggcacagtgggtg

SEQ ID NO: 880831 - DNA, 98 bp, Homo sapiens
caagaagacctatatcacagatcctgtttcagccccctgtgcgccaccattgcagccaaaggtgaccaagaatatggcccaggtgaccaaagccctgg

SEQ ID NO: 880832 - DNA, 99 bp, Homo sapiens
ccaacaaccccaacgtttcaaaaatgagtcagtcgtatcacagtgtaattccatcaacttcatttgcagcaaaagaacagcccctgatgtacgcctgtt

SEQ ID NO: 880833 - DNA, 99 bp, Homo sapiens
attcaaacctggatccttggatacaggaaaccaacagtcacacatgtacattacaggattcactccttctccagttgcacagccacacccttcagctgg

SEQ ID NO: 880834 - DNA, 99 bp, Homo sapiens
gttggttttcttcacagcttcctcatcagactcctcatcatccactcaaatcaaaggctcggatgaggatgtgctgcaacacgtcgagcgaggtgatct

SEQ ID NO: 880835 - DNA, 99 bp, Homo sapiens
attttttccagacgcttcactaagtggccgttgctcacctcgagctcttctgttttatccaatgcagagcggagcttggcctcccaaagtgctgggatt

SEQ ID NO: 880836 - DNA, 99 bp, Homo sapiens
ctccgccccagacctgtcggcgaaaggttctttctaccacactcccgaggaagctcccatggacaaagccggataatccgaaaggcgtacctggaagac

SEQ ID NO: 880837 - DNA, 99 bp, Homo sapiens
ggggatgaggcctggtcttgtggaactgaacttagctcgacggggctgaccgctctggcccagggtggtggacacgctttgcctggaggatttgcatgc

SEQ ID NO: 880838 - DNA, 99 bp, Homo sapiens
gtctaagttctctaagtactctgaaatgagtgaggaaaaacgagccaaacttcgtgaaattgagatggtgtcctcagaccgaagccaactttcctttct

SEQ ID NO: 880839 - DNA, 99 bp, Homo sapiens
gggagctggatacctgccctggcagcatggctcagactgcatgacagggagaaaagactattcagacagtgccaacaggagcaaagccagctatcctta

SEQ ID NO: 880840 - DNA, 99 bp, Homo sapiens
agtcaacattcgatttattggaggcctacttgcagcatattacctatcaggagaggagggctccgctgatcctctaaatagtgctttccatttgaccta

SEQ ID NO: 880841 - DNA, 98 bp, Homo sapiens
cgagctccagccgaaggagaaggggggtggagcgaatcaaggagcgtgtggaggagaaagagggaatccccccacaacagcagaggctcatctacagt

SEQ ID NO: 880842 - DNA, 99 bp, Homo sapiens
cttcggcctgggccttaccatcttcatcatgcacatcttcaagcatgctcaggttccagcaacagatagaaatgctttaagttcactctggggaaagct

SEQ ID NO: 880843 - DNA, 101 bp, Homo sapiens
ttttgtatgtttccttttttctttctaaggtatgtattgtgtggaggagcattacgtatccacacaatacataccttagaaagaaaaaaggaaacatacaa

SEQ ID NO: 880844 - DNA, 99 bp, Homo sapiens
tcaaacaagacaacttgagctgaaagcgaaaaactatgctgaccagagtggcagagtttgtggatgagcggccagaagaggtaaagcagatggaggcct

SEQ ID NO: 880845 - DNA, 99 bp, Homo sapiens
cgttggagggttgggactgtaagagcttgatgccacctctgtcacacatctcgcccacgtcgctgttcactagcagccttggtactcttctccttggca

SEQ ID NO: 880846 - DNA, 99 bp, Homo sapiens
gaaatgaattttgaaacttcacggtgtgccaccctacagtactgccctgacccttacatccagcggcacattgcaagcaacccgtgccttgatggtggt

SEQ ID NO: 880847 - DNA, 98 bp, Homo sapiens
tggatgaagagaaagaaaggagcaaccgtggggccacagcaatagcagaggagttttctcgggtccgggaggaggtaccactggaattggttgaagct

SEQ ID NO: 880848 - DNA, 99 bp, Homo sapiens
ccgagttcaacatcctcctggccaccgactcctacaagttcctggtccagaactttacacagaaaaggtgctcaaaggatatttgtttaatgaatgtgg

SEQ ID NO: 880849 - DNA, 99 bp, Homo sapiens
accatcccagcctgcctgcctcggggcgcagcgctgaggtcaccctggaggtagcagaatatgacagatacctagcatctagcaaaataatggcagctg

SEQ ID NO: 880850 - DNA, 99 bp, Homo sapiens
agatcaccccagagagcattctgtctgcactttccaaaacccagacacagtcagcccctgcactgcaaggtactgagtttgagggtgcagtcatagctc

SEQ ID NO: 880851 - DNA, 98 bp, Homo sapiens
cactatgcccgcaaggtgggctacagattttgagatacagagtgaaaatggggagaactgtaatcaagacatgtttgagaatgaatcacgtaagatat

SEQ ID NO: 880852 - DNA, 99 bp, Homo sapiens
gtgtgaatgctctgtcagcagatgtgctgggtcgatgccaggtgtttgaagagacccagattggaggcgagaggagtggaagctggacacactatgtga

SEQ ID NO: 880853 - DNA, 99 bp, Homo sapiens
cggggaactagggagcgtctccggctgcacagcgctcagctttcggaaaatgtgattgatcgaatgaaggaatcctctccatctggttcgaagtctcag

SEQ ID NO: 880854 - DNA, 99 bp, Homo sapiens
caggcgtacaagtgagtctgattatatgccttaagtaccttgatgaaattagcacattctttcttcattattatctcaggaggaatacaatgagttaga

SEQ ID NO: 880855 - DNA, 99 bp, Homo sapiens
tgattagcttcgcagtctggaaagctttaggagttcacagtgcagcccttgacattagacagtcagtgtttggtggcaaaaatatccacgtagcaacag

SEQ ID NO: 880856 - DNA, 99 bp, Homo sapiens
tgagtacccagaggaggagagcagtgatggagatgaggattccagaggtgtggatgaggtcaccattgtcaacattttgaccaaccgcagcaatgcaca

SEQ ID NO: 880857 - DNA, 99 bp, Homo sapiens
cggaattggtgggttcttggtctcactgagttctagaatgaagctgcagaccctcgcaggcttcctgaggctgcggtggtcacgcttcgcccgtgtcct

SEQ ID NO: 880858 - DNA, 99 bp, Homo sapiens
gatatggcaggaaccagggcaacacctggctcacagcctttgtgttgaaggtcctgagtttggcccaggagcaggtaggaggctcgcctgagaaactgc

SEQ ID NO: 880859 - DNA, 98 bp, Homo sapiens
ctccagtagcaaggaccagtccctcggggggaacgtggtcatcagtggtcagtgggggattatgaaagcccttgcaaatgctggagtacctgtcccta

SEQ ID NO: 880860 - DNA, 99 bp, Homo sapiens
tcgactgtgctgcaagttgtgcgaactctggggcagaattccttagtcctgctgccggatgcagacttgagaaggtcaattcagtgaagatatgatacc

SEQ ID NO: 880861 - DNA, 98 bp, Homo sapiens
aaccatttgaaggaacagcatcctgacatcgaaaacccggacctcgcttacctgcatgctgtaaaggcatgacttcctggcaccacagggaaaatcgg

SEQ ID NO: 880862 - DNA, 99 bp, Homo sapiens
ggggagatatcatgctctggaattttggcatcaaggacaaacccaccttcatcaaaggggaccctcgagatgcccctcctccaactcgtgctgaaaccc

SEQ ID NO: 880863 - DNA, 99 bp, Homo sapiens
ctacaacaggaaaatcatattatagatggagtaaagacacccttggtgcaggaggtgcaccagaacttctcagcttggtgttcccaggtggttcgcctg

SEQ ID NO: 880864 - DNA, 99 bp, Homo sapiens
tgaagaagaatttcgatctccgccctggggtcattgtcaggatagcggttgatgggccctttggcactgccagtgaagatgtgttcagctatgaggtgg

SEQ ID NO: 880865 - DNA, 99 bp, Homo sapiens
gcaacagagcgagactccatctgaacatgcatgcacagacctccaaacagcagcagcactgcagcgtggaccacgtacacaaacacctgaggactgagg

SEQ ID NO: 880866 - DNA, 99 bp, Homo sapiens
cgcacctggggtggccctggcgtgcgggcggcgacatggaggacggcgtgctcaaggagggcttcctggtcaagagggttatgtgaaattacctccaga

SEQ ID NO: 880867 - DNA, 99 bp, Homo sapiens
gaagccctgctactgctggattagcgccagatccctgcatgtcactgagtccaccatgctttacagaagaagacagatttagtctggaagctcttcaaa

SEQ ID NO: 880868 - DNA, 99 bp, Homo sapiens
acaaaatcaatgaaggtgacctaattgcagaggtgctgccatgcttactgagtcccttctctctccttctctatcatcttccatcagtgagtatcacca

SEQ ID NO: 880869 - DNA, 99 bp, Homo sapiens
cttgccttcacggagcttcggcatctacccttattccaggcggctgctcaggtacacctgccgtacccttttcgaacgccacaaactactattcagttt

SEQ ID NO: 880870 - DNA, 99 bp, Homo sapiens
ggacacgtgttccggaagcagcacccctacacgttcccgggtggcagtggcactgtctttgcccgtgagaaagatcagtctaaagaaaaggagaagaaa

SEQ ID NO: 880871 - DNA, 99 bp, Homo sapiens
cagactcctgtgatgtaaatgactgtgtccagcaagttgtggaacttctacaggaacggttgggagctgaaagtgccgacagcattggtgccgtgttaa

SEQ ID NO: 880872 - DNA, 99 bp, Homo sapiens
cagctctattatttcaaagatgaagatgaaaccaagcccttgcaacttgagttggtggaaccaagtggctggattcatgttcccttaactgacaatcat

SEQ ID NO: 880873 - DNA, 98 bp, Homo sapiens
ccctcttctagacctcatgagcgacgcccttgtcctcgccaaaatgtcctcctccgcctcctcctctctgcatgcgcgtcagagcccgtgccaagaac

SEQ ID NO: 880874 - DNA, 98 bp, Homo sapiens
aagatggggacggcaggagggaagtgagaagcccaactaaagccccacatttgcagctcattgaaggaaaggaagtacatttgaagaacgcaagtaga

SEQ ID NO: 880875 - DNA, 99 bp, Homo sapiens
tatacaaatcactttagaatcttggctctaagtgccacaccaggtagtgatataaagtgggatgaagctctcttgactatgagtaaaggagaaaaggct

SEQ ID NO: 880876 - DNA, 99 bp, Homo sapiens
catggcccaggcagaccttgcagtcaaagtgccaagactggctagaggccctgcactggtacaacactgccctggagatgacggactgtgatgagggcg

SEQ ID NO: 880877 - DNA, 99 bp, Homo sapiens
gggacttgggcccagtttatggcttccagtggaggcattttggggcagaatacagagatatggaatcagattccacatgggagtttctcagactgattc

SEQ ID NO: 880878 - DNA, 99 bp, Homo sapiens
atgaggaaatgagagaaatgcttacacacagaaatggatcctgaggaatttgctcctgggccatgaagatgggaagctgagtcagagtgcagttcttca

SEQ ID NO: 880879 - DNA, 98 bp, Homo sapiens
ctgttaaagctggtctgttctaactgagttaatttgcaggttctccctctgcctgccaccccacccagcaaggaggagaggaagtgttgagaagggaa

SEQ ID NO: 880880 - DNA, 99 bp, Homo sapiens
cacaggattgcttctacttcaggcagtgtcgtgggcatcagttccatgccattgcagtgtcaactaggcctcagttacttttcagtttgcccaaattga

SEQ ID NO: 880881 - DNA, 99 bp, Homo sapiens
atgcggaaagcgcgtgagcgctggagcttcatccgggcacttcataagggatccgcagctgctcccgctctccagaactggacttgaagccatcatgga

SEQ ID NO: 880882 - DNA, 98 bp, Homo sapiens
aagaactcaagaaaatcttcgaagacttttcagtccgattcccatcccacttcagttcagatctcaaggaccttctacggaacctgctgcaggtggat

SEQ ID NO: 880883 - DNA, 99 bp, Homo sapiens
agcatcactataaaggatggagtaaatgacaggtctgaaatgtgtccaccactcggtgaagaaactcaatgacaaacagaggggggacctccgtctgga

SEQ ID NO: 880884 - DNA, 99 bp, Homo sapiens
gggtgacctcaccactggaacccgttcaacataaaccttgctgcaagaactagcagagctctttggacaaaacgtgacggggtttcaccatgttggcca

SEQ ID NO: 880885 - DNA, 99 bp, Homo sapiens
gtcaaacaactctgtgaccaggatgttggcacggcatggcatgtcaccctctgcttaagtgcattccgtgcaatcgtctggaacgcctgctccacgttg

SEQ ID NO: 880886 - DNA, 99 bp, Homo sapiens
ggccctgctccagctcctcagggcttcgctctacacctcaactcctggctcaatactgatggaagtaatctgcttaacaatctcagaaggactgtgcaa

SEQ ID NO: 880887 - DNA, 99 bp, Homo sapiens
tgattttaagctggcaaagtgggaaaaataaagtgttgagtaaacagaccaagttgggcaatgatagtaagaaatgctaaagatacagctcatacaaaa

SEQ ID NO: 880888 - DNA, 98 bp, Homo sapiens
ggagagccccaaagtccaaatccttggaccagctatcccccaacttcctccttaggggcagaagctgcacatcattgactcctgggcccaactgtgac

SEQ ID NO: 880889 - DNA, 99 bp, Homo sapiens
ccagcagccgcttccgacagaactgaatgtaacttcaccgagtaaagaggagtatgtaacctcgggtatggtgaaagacccaccggacgtcttggacag

SEQ ID NO: 880890 - DNA, 99 bp, Homo sapiens
gccagtcttctatgtttccacatcggtcagaaaaagatggagttctgggaaatcgttcattcatttacagatgaacagaaaagactcttcttgcagttt

SEQ ID NO: 880891 - DNA, 99 bp, Homo sapiens
gcttccagtggtagcagcagtaccaggcgttcgtggcattcagggatgtggctgtgtacttcacccaggaggagtggaggttgttgagccctgctcaga

SEQ ID NO: 880892 - DNA, 99 bp, Homo sapiens
ctcctgagtaactgggattacagattgccatcacgaaagccaaagtggatttctccagtgtggtgtgcctgcccccttccgtcattgctgtgaatgggc

SEQ ID NO: 880893 - DNA, 99 bp, Homo sapiens
ccgagttcagtcacgagactgccgactgccagtacctcttctcttggtacacctcagccgtgtgtcctctggggtctgccatcatggatgttctcgcag

SEQ ID NO: 880894 - DNA, 99 bp, Homo sapiens
caagggtggcaagcatcaccttggcctggaggagcccaagaagctgcgaccaccccctgccagggtgatggccgttttgctggaagaggatcgcttggc

SEQ ID NO: 880895 - DNA, 99 bp, Homo sapiens
ccagcgccatctcctcctccatggcagaggcttcctctttggcccgacgacggttctccttctgtgagcttggcctgcttctgctgtctggcccgtaac

SEQ ID NO: 880896 - DNA, 99 bp, Homo sapiens
cagcaattacaaaaatgatgtcatgatcagaaaagagccccacttggacgtcagccccacccttggatccttcagggtgggtctcctgtgtaccctcct

SEQ ID NO: 880897 - DNA, 98 bp, Homo sapiens
gcagatcctggtcctcgatccgcccacagacctcaaattcaaagagtttgctctccaaagctcggggaattgattccagctctgttaaactccggggt

SEQ ID NO: 880898 - DNA, 99 bp, Homo sapiens
ctttatttcggatggtgcagcagacaacttcatgagttcacatcctctcacctccaagcttttatctgcattggagctagttctgttatcattaggatt

SEQ ID NO: 880899 - DNA, 99 bp, Homo sapiens
ggagaggacgaggtggaccacctgatcctgctggccctcatgacagtggtcatggccgtgtgctccctgcctctcacgcgcaccctttgcatatctcta

SEQ ID NO: 880900 - DNA, 99 bp, Homo sapiens
cctcgcgccatggcggcccccggcagcgcccggcgacccctgctgctgctactgctgttgctgctgctcggaggcacgcggacctccagtggccggctc

SEQ ID NO: 880901 - DNA, 98 bp, Homo sapiens
gacatcgacatccaggcgaactcggcctatcgctaccctccgaagtccgatgccaattctcggaagcaagaagcagagtggaaagaaaaggcaataaa

SEQ ID NO: 880902 - DNA, 99 bp, Homo sapiens
agcctcttcatcctcaaacaggtggttggaggcaaagtaaagaagcccggtaaacgtggtcggaagccagccaaaattgacttgaaagcaaaacttgag

SEQ ID NO: 880903 - DNA, 99 bp, Homo sapiens
gtttgatactgacctgtaaatcatcctttaggaatgtctgaatctgaacaggctcttaaaggtacttctcagattaaattactctcatctgaagatata

SEQ ID NO: 880904 - DNA, 99 bp, Homo sapiens
ccagcggctgcaggactgggcacagcatgagatccaaaggcagggcaaggaaactggccacaaggggggccctcagcctcttggccttgaacgggctgt

SEQ ID NO: 880905 - DNA, 99 bp, Homo sapiens
catttctaagcaggttcatgccagcccagaacagagaatcaggtcatcatcagatttgaaatatttaaagtggatacaaaactatttcagcaatgcaga

SEQ ID NO: 880906 - DNA, 99 bp, Homo sapiens
tcggaggactcggagtcggagggcttggagttccaggtgttgggggccttggagcatccagatggtccaccactgcaccatccacgggaacacagagga

SEQ ID NO: 880907 - DNA, 99 bp, Homo sapiens
ctccacagtgtgcacagatgaacgaagttatggcagagttagctaaagaactccctcaagtttcatttgtgaagagtctcactgtgtcgcccaggctgg

SEQ ID NO: 880908 - DNA, 98 bp, Homo sapiens
gcggagatccgctacgagggcatcctctacaccatcgacaccgaaaactccaccgtagcccttgccaaagatcatcagaaaagcccttactgaggaaa

SEQ ID NO: 880909 - DNA, 99 bp, Homo sapiens
gtctgaaattaggatagacatttattgttcttgcataggcccaacgaagcaaggcaggattttctgctaactttcatgctgccaaaagctgaaggctgc

SEQ ID NO: 880910 - DNA, 98 bp, Homo sapiens
ccaatttaacaaactaggaagatgaaaagggaaattgtggccaaaactttgggaaaaggagccactggctgccagaaactcattgaagtggacgatga

SEQ ID NO: 880911 - DNA, 99 bp, Homo sapiens
gaatgtgtgcggacacactctgttaaaaagatcaagtggcatgagcagccttttggggaaaattggtgccaagaagcagaaaatgagcacccttgagaa

SEQ ID NO: 880912 - DNA, 99 bp, Homo sapiens
tcatccaggtccagttgtacatttaagcgatagcccaagagatgaaggcaaagttggtgggacaagtgatgttgaagtgaatgaaaagaaagacagagt

SEQ ID NO: 880913 - DNA, 99 bp, Homo sapiens
ccgaaacaccggtaggagcggggaggggctggcaaggtttaattgcttatggatgtcattcacttgtggtagtgattgattccattactgcccaaactc

SEQ ID NO: 880914 - DNA, 100 bp, Homo sapiens
ggatgcctgcatcaacctcggcctgttggaggaagccttgttctatggtactaccatagaacaaggcttcctccaacaggccgaggttgatgcaggcatc

SEQ ID NO: 880915 - DNA, 99 bp, Homo sapiens
cactgcaagagtcaggttccgatgatcgcgctgcaggttgcacagagcattgaggatcaccatcaggaagtgattggtttctgcagagagaatggtttc

SEQ ID NO: 880916 - DNA, 99 bp, Homo sapiens
caggaaccttttggccatctggcgctcacctttttgcatcttgacctgtgttaaatccccggcccaaggcaggccagggcctgtggttcttccagaggt

SEQ ID NO: 880917 - DNA, 99 bp, Homo sapiens
ctgcgccctgcggcccgctccccggggaccgggccggcgccatggaccgaggccaggatatggaatgtgcagatgtcccactattaactccaagcagca

SEQ ID NO: 880918 - DNA, 99 bp, Homo sapiens
tggaatcttcaatcaatcatatttcacaagttcaaaccttgtactactcagctgatcacaagctgcttgatgggaacctactagatggacaggctgagg

SEQ ID NO: 880919 - DNA, 99 bp, Homo sapiens
ctttttctttatacaattcatgaacttctttccagccctttgtaatatatttggtcacaattgcaagtccaagtgatatgtctgggcctttaaaacgtt

SEQ ID NO: 880920 - DNA, 99 bp, Homo sapiens
tccgccgccgccgccttgctgctgctcaaagctgctgccgccccttgggctaaaagttggcaaacatgaattgactgggcataaagtagctgtgaagat

SEQ ID NO: 880921 - DNA, 99 bp, Homo sapiens
gggacagagtctgcagcaaaaaaggaggaagaaggcacctacgatcaaactctggagttccgtaggggaggtgatggccagccaagacgatccactcgg

SEQ ID NO: 880922 - DNA, 99 bp, Homo sapiens
cagtgatcttgattctcgttgttcgatgcatttctgcttgataaaaaatcctgtcggttcctttcatccattatgcgtgtgatttgtattttcttccgc

SEQ ID NO: 880923 - DNA, 99 bp, Homo sapiens
caaacattattgctatgggatttcctgcagaaagacttgaaggcgtatacaggaacaatattgatgatgtagtaagtcacccacaaaagctgtatataa

SEQ ID NO: 880924 - DNA, 99 bp, Homo sapiens
ggggcaaacactttccagaccatgagatgcctgcgaaggatggaggctgccaaggcacaggccagaatatcctcaggtgagtggcaaccaccagaagtg

SEQ ID NO: 880925 - DNA, 98 bp, Homo sapiens
ccggctcccaggtttattctcccatagcatgtgatgccttcaattaagttgcagagttctgatggagagatatttgaagttgatgtggaaattgccaa

SEQ ID NO: 880926 - DNA, 99 bp, Homo sapiens
gctaacgttctgcaccgtgacctcaagccttccaacctgctgctcaacaccacctgtgatctcaagaaaaattctgtaggccgttggaaggaagctacc

SEQ ID NO: 880927 - DNA, 99 bp, Homo sapiens
gactcggtgattgaggacaagaccatcgagctcatggtgacagatcagtcagtgaaagcatttgctgaacactgtcctgagcttcaatatgtaggcttc

SEQ ID NO: 880928 - DNA, 99 bp, Homo sapiens
cgcatctatagtttccagatggctctaacctcagtggttgtggtttctcgatcaggaccatcaacccctcatgtgaattttctcctggactcccatcca

SEQ ID NO: 880929 - DNA, 99 bp, Homo sapiens
cgcagtcgtgcaggatctgaaggagactggtcgaattgacaaatcttaccctacagtatgtggccacacaggaccagtgctggacatagactggtgccc

SEQ ID NO: 880930 - DNA, 99 bp, Homo sapiens
aagctgatgatcggaatgattacaggctgtaagactggaaagtacttaccagaatcgaacacgctatatggtagtggtttcaactaatggtagacaaga

SEQ ID NO: 880931 - DNA, 99 bp, Homo sapiens
aatccagatcattccacttaccatgatttcgatgatgatgatcctgaggttcaaaccttgtactactcagctgatcacaagctgcttgatgggaaccta

SEQ ID NO: 880932 - DNA, 99 bp, Homo sapiens
ggacgacccactgcgccggcccatcaccatagctcttgttgagtctaacagtattaatcacaatggagaccattaaaaatctcaagtgacgactttggg

SEQ ID NO: 880933 - DNA, 99 bp, Homo sapiens
cacagccccgacctttgatgagaactcagctgtccagtggtagcaactgcccttgctaatcaccgtaacctcggctgagaaagaagaggaagcgaaatc

SEQ ID NO: 880934 - DNA, 99 bp, Homo sapiens
agtgttggtgcttcttttcagtgccagtccatccatcacgaccacatttgtcatgatgacagtgacaaggttatatcttaagtgtggtgctgctaacat

SEQ ID NO: 880935 - DNA, 99 bp, Homo sapiens
tgattgcaatcagcatgggatttggccatttctatgcttttagtttggatgctgaacagcctgattatgatttggattctgaagatgaagtatttgtga

SEQ ID NO: 880936 - DNA, 99 bp, Homo sapiens
ttcctctgcatgggggtgatgaagacagaccctttccaggaacagttgatacgccatctctacaagaaagaatacaagccagaggaaatcctgaagagg

SEQ ID NO: 880937 - DNA, 98 bp, Homo sapiens
gtgtcccttcaaagatgtgagagagaaaagtgagtttattctgaagagcatccaggtggaaattctttgtgagcacccacgtttccgagtgtttgtgg

SEQ ID NO: 880938 - DNA, 99 bp, Homo sapiens
aggaactgcaggcccgctatcccaatcgctttaagctctggttcactctggatcatcccccaaaaggttcttgggtgtctctggggagtccctgggcca

SEQ ID NO: 880939 - DNA, 99 bp, Homo sapiens
tggctgcatctcgagacttttcttttcgacgttcagaacttatcagagtgtgtccgcacacattcaccatcagcttcaaggaggggttccgatatttgg

SEQ ID NO: 880940 - DNA, 99 bp, Homo sapiens
aaaaccaaagtctcttctgctgggaaatcccagtacagatccatgccaatgaagatgtggaaagaatgttactaggaaacaagtgtgatatggacgaca

SEQ ID NO: 880941 - DNA, 99 bp, Homo sapiens
tcgaatctgagcaaaggcacgggcagccggaaggacaccaagatgcggatccgggcctttccggcagagaattcagcgttggctttggagaatgaaaat

SEQ ID NO: 880942 - DNA, 99 bp, Homo sapiens
gccatctgctctgaggctttctcgcttgtctctcaaggcggggtttcaccatgttgcccagactggtcttgaactcctgagcttaagcaatccacctgc

SEQ ID NO: 880943 - DNA, 99 bp, Homo sapiens
catatcagtcatcatgatggtggtggctggcttcttcaccctctgtgccgtgctctcagtcttcctcctgcagcggaaggacactcgtgaagtggtagc

SEQ ID NO: 880944 - DNA, 98 bp, Homo sapiens
cgggctccacaatgtagaggaaatggcatcgcctggcagctctttcagtctcacatggcaacgaaaacaacttgtatgtcttcacaaggatcagatga

SEQ ID NO: 880945 - DNA, 99 bp, Homo sapiens
tcacccgcactgagtcaacagactgagcgcgtccaggcctgacagctctgcggctcgggccctgagtcattgaaattatgagactatcattcaaatgga

SEQ ID NO: 880946 - DNA, 99 bp, Homo sapiens
ttctggacaagtgtaatgaaattatcaactggcttgataagaatcagaccaagatcactccatggatgaaatgacagctgtggtgaaaattgaaaaagg

SEQ ID NO: 880947 - DNA, 99 bp, Homo sapiens
gattgagaatgtccatggatttgtttctcattctcatatttcaccaataaaggtattgaagcccctgggtgataatttgatggaggaaaacataaggca

SEQ ID NO: 880948 - DNA, 99 bp, Homo sapiens
ctgctgtgcctcctcctcctgtggtggaggagaaggaaagatctgacaggatggcatctgatgactttgacatagtgattgaggccatgctggaagctc

SEQ ID NO: 880949 - DNA, 99 bp, Homo sapiens
actgtaggtattcagtgttcgagaaggcgcttacagctcaatgctaatcaggccttcttcctgttggtgaacggacacagcatggtcagcgtctccaca

SEQ ID NO: 880950 - DNA, 99 bp, Homo sapiens
catctttacagaggaatagtctacaaaggaagacttgtaacctggagaagaggcagctgattacagaagagaggattccaaacaacacacagtgggtca

SEQ ID NO: 880951 - DNA, 99 bp, Homo sapiens
tactttccctcctggcagtcacttctatcccttcagtgagcaatgctttaaactggagagaattcagttttattcagtagagacggagtttcaccgtgt

SEQ ID NO: 880952 - DNA, 99 bp, Homo sapiens
gaaaaggagaacttcttaagaagagtggcagcctgcttctgcaaagtggtacgatcgaagggactatgtcttcattgaattttgtgttgaagacagtaa

SEQ ID NO: 880953 - DNA, 99 bp, Homo sapiens
ctcctgagtagctgggattacagggccggtattaccgcaccaaccacactgtgatgaccatgggctcggacttccaatatgagaatgccaacatgtggt

SEQ ID NO: 880954 - DNA, 99 bp, Homo sapiens
ctgtgagtaagtgacgtgtcctctgttccttctctttcttcacaggttttgaaggaagagtttcttttggatggctggggatggtgtgctatatccact

SEQ ID NO: 880955 - DNA, 99 bp, Homo sapiens
tcagcctggctgccggcttgttcttactggccctgagtctttgggggcagcctgcagaggctgcgagacattcttaccaccgctctcactatgatcctc

SEQ ID NO: 880956 - DNA, 98 bp, Homo sapiens
ctgaatccatcattgcagctgcatgttcaagaagtggccggagagttctgcatgttgattctgtactaaaggaagtataccaagcctttaatcccaaa

SEQ ID NO: 880957 - DNA, 99 bp, Homo sapiens
gctgccatggctgcaagacctcattcaattgatgggagagtagttgagccaaaacgtgctgtagcaagagaggtggaaaaggagggagctgctctcagg

SEQ ID NO: 880958 - DNA, 99 bp, Homo sapiens
ctaccatttctgctgctgttcctcttgaacatctgattataggaacagcacctgggttggacttcatggtctcaatgatcacatctgtcatttctcgac

SEQ ID NO: 880959 - DNA, 99 bp, Homo sapiens
gctgacgtttcgagggcactacagcccgagcaataggaggaggaggaggtacacgtgctgggtaactgtacatcctgtaatcccagctacgcaggaggc

SEQ ID NO: 880960 - DNA, 99 bp, Homo sapiens
ttgtgatgttggcagttgaaccgaccatcagcttatacaagtacctactgtcaacaacgggaagtggaggccattactgaaggtgtagaggaagatgaa

SEQ ID NO: 880961 - DNA, 99 bp, Homo sapiens
tcacttctgcctttccagtgacaaaatggtgtggtatggctaccatattactaaagcttcctattttatctgccatgatcaagaaaccattaagaaatt

SEQ ID NO: 880962 - DNA, 99 bp, Homo sapiens
aacatggcactgttgcctatcagaagtcaattcaaaggacctgcccccagagagaatgttcattctggacagagtggaaggtgatacttgttcccttaa

SEQ ID NO: 880963 - DNA, 99 bp, Homo sapiens
atcaaaaacagaagatcttcaggagtgattacccttgctccccgcagctgagaaacttcagcagcttgctgtaactggaaaatcgggtcactcccaccc

SEQ ID NO: 880964 - DNA, 98 bp, Homo sapiens
cagctcctcacttggactcctcttgaggaggcaggtggaagtcatcataaagtttctgtttcacccgtcgtccatgttcgaggactctgtgaatctgt

SEQ ID NO: 880965 - DNA, 99 bp, Homo sapiens
ttgtggaaaagggatattacagtgagcgagatgctgcagatgccgttaaacaaatcctggaggcagttgctgtctcttgtggctcagagcataatttgg

SEQ ID NO: 880966 - DNA, 99 bp, Homo sapiens
ctcccccatctggaagaggattattctctataatcccagttagagacacaatgacataaacatcgctttaatcagctgtgttcagcgaatacttatgaa

SEQ ID NO: 880967 - DNA, 98 bp, Homo sapiens
taacgtgatgaagggctggcagtaccgttggttcgtgctggactacaatgcaggactgctctcctactacacgagcttccttatggctgggagaaaat

SEQ ID NO: 880968 - DNA, 99 bp, Homo sapiens
catcgcgttttgccagcgataatacgcctcaggtgaccaagaatatggcccaggtgaccaaagccctggacaaggccctgagcaccatggacctgcaga

SEQ ID NO: 880969 - DNA, 99 bp, Homo sapiens
ccacagtgtcctctggaaaatgatgctgtctttgcatttcaactacgcaacccagtgcacaatggacatgccctgttaatgcaggatacccataagcaa

SEQ ID NO: 880970 - DNA, 99 bp, Homo sapiens
acggttccaacagcttcctttgcagggaaaattgatgccagccaaacctgtaaacaactttatgagtctgtacgagcaggtgataataaatatatgcac

SEQ ID NO: 880971 - DNA, 99 bp, Homo sapiens
ctcccagcagcagccacacagtatcagatacaatgtctctttgctatatgaccttgaaaatcttccggcatccaaggattccattgtgcatcaagctgg

SEQ ID NO: 880972 - DNA, 99 bp, Homo sapiens
caggactgggcacagcatgagatccaaaggcagggcaaggaaactggccacaacattttgaaagcgaagcagaagccgtagaatcagcggcgagcctgt

SEQ ID NO: 880973 - DNA, 99 bp, Homo sapiens
ggtgggagtgacctgattttccaggtcaccggattgaaactgtctcaggaccttgatgatcttgccattctctacctggccacagttcaagccattgct

SEQ ID NO: 880974 - DNA, 99 bp, Homo sapiens
ggaaatcaaaccgaaaatgtgtatatagctccccagaggcccatctcaacacagagaaccgctgcggctcctaaggctggccctggtgtggtgcgaaag

SEQ ID NO: 880975 - DNA, 99 bp, Homo sapiens
ggcttttaataatcgaggtcgtttttcttcaacactttccctggattgctgcttaagcttcctcaaaagagctgtaactgtggtcctagctacttggga

SEQ ID NO: 880976 - DNA, 99 bp, Homo sapiens
tatcgaggtggatggaaagcagactctttttgatcagaacaatgctgcaaaaaaagaagagtcagaaactgccaacaaaaatgattcttcaaagaagtt

SEQ ID NO: 880977 - DNA, 99 bp, Homo sapiens
tctgatgacggcactgttagaatctgggactttcttcgttgccatgaggaaagaattctccgaggtttgccatctgcaaatctggccgcacctaacctc

SEQ ID NO: 880978 - DNA, 99 bp, Homo sapiens
cagaatttgtatagagatgtgatgttggagaactacagaaacctggtctccctagcaaaatgcattgatcactacaccaaacaatgtgtggaaaatgca

SEQ ID NO: 880979 - DNA, 99 bp, Homo sapiens
cctggagtgattcgcataatttctctctgttgcacacataccaagaacttctctgaatatcctgttcagtcttagcgtacatctcagacagatcaccat

SEQ ID NO: 880980 - DNA, 99 bp, Homo sapiens
agtatgagcgtagagtggaacgggcttaagagttggacagtggaggaccttcagaagaggctcttggccctggaccccatgatggagcaggagattgaa

SEQ ID NO: 880981 - DNA, 99 bp, Homo sapiens
gcttcagtttttgtgtataagagagaaaatgaagacaaggttaataaagctgccaagtgccggtggtggtgtgcacattgagccccggtatagacagtt

SEQ ID NO: 880982 - DNA, 99 bp, Homo sapiens
tttccttgtgcctccattcccgggaggggggagcggcgttggaggccaccgtttccaggaaagaccacagcaagattctttcattcgtctcctcctagc

SEQ ID NO: 880983 - DNA, 99 bp, Homo sapiens
ctctccagccattttatcaactgcaaatccctcaactgatagccaaacacccagcattgtgttcctacgcgcttgcactgtgtgtcggtgaggtaagcg

SEQ ID NO: 880984 - DNA, 99 bp, Homo sapiens
cttgaaaacatggggattggaattcggctaacaataaatgcccttgcccagaagctcaatgcttactggaaggaaaaaacatctcaagataattttgag

SEQ ID NO: 880985 - DNA, 99 bp, Homo sapiens
catcccccaaagacagattgaagaaatgcagagacaggtgaacatgattaaagatgatgggacagttattcatttcaacaatcccaaagtccaagcttc

SEQ ID NO: 880986 - DNA, 99 bp, Homo sapiens
tcatggaagtggtctgtcgagatgcttgtgatggtcatgagattggaaggtcaccaaaggcttcgtgtacagctctttcctaaagccctacaatcctcg

SEQ ID NO: 880987 - DNA, 99 bp, Homo sapiens
ggcggcttcctagtgagtcggcggctgatttagaaggaggttcaggctacggtgagccgaaggcagaagcttcatgaggcagatctggagttgcagagg

SEQ ID NO: 880988 - DNA, 99 bp, Homo sapiens
atcccgaagggtgggcaagtttcagatcccttatctcactaaatgcagaaactactgggagtgaggctgccataaatctcttctggagaattttactgg

SEQ ID NO: 880989 - DNA, 99 bp, Homo sapiens
ctccagacatccaatcagagcattcaagggatggtgaaatggatgatagtcgagaatttggaggttttggttcagttagtggaaaaattgaaatagaaa

SEQ ID NO: 880990 - DNA, 99 bp, Homo sapiens
gccagtattgcagattttaactgatttggctgatcctccagggaccagtttctgtgggcgtgtattggagcaggtagagatcgtgatgtccctgcttgg

SEQ ID NO: 880991 - DNA, 99 bp, Homo sapiens
caaaaacggcccttggatgatggagggtgcttcaaggatgaccgcatcgtcttctggacttggatgttctccacctacttcatggagaaatgggctccc

SEQ ID NO: 880992 - DNA, 99 bp, Homo sapiens
tggtacaaggaccagaagaaactgcaccggaaatgtgcctaccaggtcctgaggcacgtgaatggccaggatcagattgtgcccggcctgtacgcctgt

SEQ ID NO: 880993 - DNA, 99 bp, Homo sapiens
gccagagctgagcggcgcgggctccagactcgccgtggtcaagttcaccatgagaggccatcagtggcctatgtacataccacgccgggtctgccttca

SEQ ID NO: 880994 - DNA, 98 bp, Homo sapiens
gttgaatggcttcagagtcaaatggcagacatctggtccctgggcataacagctattgaacttgcaagaggggaaccacctcattccgagctgcaccc

SEQ ID NO: 880995 - DNA, 100 bp, Homo sapiens
cccaactcatgctttggaatccagtcatctgcaataccaaaaattttagatgtcaatttttggtattgcagatgactggattccaaagcatgagttgggc

SEQ ID NO: 880996 - DNA, 99 bp, Homo sapiens
tgaggttcaggaaggattcctgagattccaggaggaagtactggcgaagtgctccatggaattgaatgatctggcacgggaccctccagcacagtgttc

SEQ ID NO: 880997 - DNA, 99 bp, Homo sapiens
ggtaacgttgctggaccgggacgcacgctcagctgaggaggacccccaaagggttatgtaccgaaggactctaccgtgtcagcgggaataaaactgacc

SEQ ID NO: 880998 - DNA, 99 bp, Homo sapiens
gtccttgcccagggcgtagtctctcaaaggccacattacgagtgtccaggtgggtggagacgataggagaggtgaggcgactggccacatgctcctcgc

SEQ ID NO: 880999 - DNA, 98 bp, Homo sapiens
aaggatcttcaacactagaagatatttgctgcagcctttaggccaatggaagcactgttgtgaagaacttatgaaaattgagattatgtcaccacgga

SEQ ID NO: 881000 - DNA, 99 bp, Homo sapiens
gaagaacagctgctgcagcggattcctgagttcaacatggcagccttcaccacaacattacagcagaggaagaaggttattttgaagcattcaaaaatg

SEQ ID NO: 881001 - DNA, 99 bp, Homo sapiens
tacttccaattccaagaagagggcaaggaaggagagaacagggcagttatccattatagggatgatgagaccatgtgaacgccccttccactgtaacca

SEQ ID NO: 881002 - DNA, 99 bp, Homo sapiens
aaagagaaaaaaagaaacataaagtaatgaatgagatcaagaaagagaatggagaagtaaagattttgctgaaaaattttatcatgtgggcaacctgct

SEQ ID NO: 881003 - DNA, 99 bp, Homo sapiens
cgctgtcactccctgacagggtcagcttgtctacttggctattagtggaagtgcggatgctataattgagttcttcacttgagagatagaaatgttcat

SEQ ID NO: 881004 - DNA, 98 bp, Homo sapiens
aactggaaagatgcacattttgcctctggttggtggaaagactcctgtggaagaggtccctgctgctattgccccattccaggggagggtgttgattg

SEQ ID NO: 881005 - DNA, 99 bp, Homo sapiens
tgcgcgccagagatcccagactgcgtggagcaggtggcagtcaatggagccaacctgcagaatgtcttcatgcttctcaccctggagcctctgctggcc

SEQ ID NO: 881006 - DNA, 99 bp, Homo sapiens
agtatgtaccaaatacatttataataggagtccagctattgctgctgttgacatatctgaagagatggattaagaatgctttggattaaggattgtgga

SEQ ID NO: 881007 - DNA, 99 bp, Homo sapiens
gctggcttcctctcggtgcacggcaggctctgctccccgggggccaggaggcccagggattctagctgctggcttaaagaggctgaagaatccgtaggt

SEQ ID NO: 881008 - DNA, 98 bp, Homo sapiens
ggaagaccacaatgggggccagaagcagctgtccccacaaaaagtgacgctttacctgcgaccagtgaactttgaggcgctgatcatcaccatgtcgg

SEQ ID NO: 881009 - DNA, 99 bp, Homo sapiens
cctagggaggcgaggttcccgcaccggatagaccttgttcccatcaggatacctaatccctctcacgcagtgctcatccctgggggcagagtccatttt

SEQ ID NO: 881010 - DNA, 99 bp, Homo sapiens
aggaatttgacagtttcctgccaggcgccatcatcggcatagcccgggagatgcagccagtttacagggtgactgtcgttcctacagttacgtgtgtgg

SEQ ID NO: 881011 - DNA, 99 bp, Homo sapiens
cgataaatcagacagaacagttaatcctcaatttaagcctgatctaacccctagaaacaggtgaattttgaagtcttcatcagtatatccatattaaaa

SEQ ID NO: 881012 - DNA, 99 bp, Homo sapiens
gaagttcaagctctacctgaccatcatcctgctcctgggtgccgtggcatgtcgatttgtccttcactacaggctggagtgcggtggcgtgatcttggc

SEQ ID NO: 881013 - DNA, 133 bp, Homo sapiens
actaccatgacgaaaacatgtactacagccagtcttctatgtttcgcagccacttctaccttgatatggatgcatataattctggtacagctgcatgccataatctttttctgaccgatgtggaaacatagaa

SEQ ID NO: 881014 - DNA, 98 bp, Homo sapiens
acgtggaagatggcttgataaagtaaaataccatgaagattttgaaaaaacaaaggggagaggctttactcccgtcgtggacgatcctgtgacagaga

SEQ ID NO: 881015 - DNA, 99 bp, Homo sapiens
ggccagcatcatcctgataccaaaacataaacaatttcccttgtagaaattcatcttcagaatgtagtgaagaatgttgataagcatctggttataagg

SEQ ID NO: 881016 - DNA, 99 bp, Homo sapiens
gctgccacctgcctttgacctttttgaagcctttgcaaaaagcctaaaaccattggccaaccgtcacgcaactgccagtaaaaatattttccgagaaga

SEQ ID NO: 881017 - DNA, 98 bp, Homo sapiens
aaacacattcaatgcagttagaaggaaaaggtcaactcgatccaatacagacccattagtgaccagaaggatcccaaggatcgaatggttcaggttgt

SEQ ID NO: 881018 - DNA, 99 bp, Homo sapiens
aaggatccgagcctgtggccgcccatcagggggaagaggcgtcctgttcttcctgggggactggcagattcctgacattcagacaactgacttgtaact

SEQ ID NO: 881019 - DNA, 99 bp, Homo sapiens
aggagcgcactccgtggccccgatggagcggtacaaaggtcttatatccagatggccaggctcagatgattcaccccaagcctgcagacttccggaatc

SEQ ID NO: 881020 - DNA, 99 bp, Homo sapiens
ggaagagattgtatacccccaaaaaatgcctgtgaggagccaccaacatttgaagctatggagctcattggtaaaccaaaaccctactatgagattggt

SEQ ID NO: 881021 - DNA, 99 bp, Homo sapiens
cccagcagtgcaaacagacttcggagtacctgcgctatgaagacacgcttcttctggaagaccagccaacaggtgacttcatggtcatgacgattttct

SEQ ID NO: 881022 - DNA, 99 bp, Homo sapiens
ttagtgcctcatttcggagcctttataagtcagtttttgagcagtcacttagtcaacaaggaccacagaatactggccatggtgcaacttctggttttg

SEQ ID NO: 881023 - DNA, 98 bp, Homo sapiens
gaaaacagaaccgacttctccccttgtggaattacaagagatttcgactgtggaaggaatgaggggagaatcatacttcatcggaatgaggagcccag

SEQ ID NO: 881024 - DNA, 99 bp, Homo sapiens
taacaaccggcagcggactcctttggctatgtacaaaacgtttaattgtggatgtcatccggttccagccaggagagaccttgactgaaatcctagaaa

SEQ ID NO: 881025 - DNA, 99 bp, Homo sapiens
accagcttgaccctccctccaggcatcagacctgggcgagccgttggtgatcaaggacacttcctgattaagacttgcttttagaacttcataactgct

SEQ ID NO: 881026 - DNA, 99 bp, Homo sapiens
ctcctgagtagctgggactacagctggaacagatggtgatcaaaatggacttgatcacccatctgttgaagtttccttggatgaaaactcaggaatgtt

SEQ ID NO: 881027 - DNA, 99 bp, Homo sapiens
tgagcaccctgtggctggtgggggccggccccggcctggtcctggccccggagctgttgctggacccctggcagggccaaagaagctaaacgactaaaa

SEQ ID NO: 881028 - DNA, 98 bp, Homo sapiens
cattccccaggcgctggcctatgctgaagtggctggactcccgccccaggttctgctccagacgagcccttaccacgttgactcactcctgcagctca

SEQ ID NO: 881029 - DNA, 99 bp, Homo sapiens
cacgtttcccttcctccatatttactggacagagtgctgtaagctaaaccagccccagaaatatttgaaaatgaagtcatggccctgctgagagacttt

SEQ ID NO: 881030 - DNA, 99 bp, Homo sapiens
gaggccaggagccaggggcccagaagatccacatgaagaccatgcccgccgccatgttcaggctcctcacgggtcaggagaccccgctgtacatctagg

SEQ ID NO: 881031 - DNA, 99 bp, Homo sapiens
gaatgtcacgaatgcttgaagacagagatttattcgtaatgcgactcaaagctgcacggcagtctgtttatgagattctgagacgcccatccctgcaac

SEQ ID NO: 881032 - DNA, 98 bp, Homo sapiens
agccttgttctatggtactcggaccatggagccatacagggtggttctcttcccaaagtggaagccaaattcatcaattatgtgaagaattgcttccg

SEQ ID NO: 881033 - DNA, 99 bp, Homo sapiens
ggggagtcaatgctgaggtccactactccctcctgaaaggtttctaagcatgaattgaggaacagaagaagcagagcagatgatcggagcagcatttgt

SEQ ID NO: 881034 - DNA, 99 bp, Homo sapiens
gtgcatgtcaaaactttaagaagattccccatgttaaggtacccttgtccacattttgccccaaggaatgatgcagctctggatgttggaaaggacaat

SEQ ID NO: 881035 - DNA, 99 bp, Homo sapiens
ggcacgcatcctggagctagaggatgacatccagaccatcagtgagaaagtgctgacgaaggaagtggagctggacagtggtgggggaaaagtagctcc

SEQ ID NO: 881036 - DNA, 99 bp, Homo sapiens
atgaagatgaggaagctgagtcagctacgggcaagcgggcagctgaagatgatgagatgctggcatcaccatctacatcaggtcagctgtctcagtttg

SEQ ID NO: 881037 - DNA, 99 bp, Homo sapiens
cgcgagccccgtcctccttcgccgccgcgcacaaccgcacgtgcaggtcatttgattgcccgcctcagaacgatggatctgcatctcttcgactactca

SEQ ID NO: 881038 - DNA, 99 bp, Homo sapiens
ccggaacatgcttatcgactgtgagaaccagtgtgtcatcattaggccctgtctctgcccctggtggtcatcgtccatggcaaccaagacaacaatgcc

SEQ ID NO: 881039 - DNA, 99 bp, Homo sapiens
ttgtggcacagcatctgacaaacactgtattcgttgacagagctttgatagtcgtaccatatgcagaaggttcaaaccttgtactactcagctgatcac

SEQ ID NO: 881040 - DNA, 99 bp, Homo sapiens
agctagtaatttgccttctggattgattttaaactgtctacggttcttaacctcatctgttaagttcccatgcctggagaagctaatgccaactcatca

SEQ ID NO: 881041 - DNA, 99 bp, Homo sapiens
gtgtttggagaaaaggactcagtctattgcgtctgcagacatggatttcaaccagctggaggcattcttgactgctcaaaccaaaaagcaaggtgggat

SEQ ID NO: 881042 - DNA, 99 bp, Homo sapiens
ctgtgcagtggcacctgcgcgaagctggccaaagcctgcccagacggctcacctgtgcgggatggaacaaaagatttgaggcttaagcaacttcttccg

SEQ ID NO: 881043 - DNA, 105 bp, Homo sapiens
ggtgcccctcgtcacagtaatctaagttggcaggttgatctgttccagctgcaggtgaacaccctacgacgttataaacgacactacaagttgcagaccagacca

SEQ ID NO: 881044 - DNA, 99 bp, Homo sapiens
gggcctggagtgtgtgcccactgaggagtccaacatcaccatgcagaagatgggtgtgaacctgacacgcagcaacaaggagacggtgaagcacagcga

SEQ ID NO: 881045 - DNA, 98 bp, Homo sapiens
gcatctgcttttccacaaccagtttataagtgctgttaaatatgtggcatcaagcatgatggaaccatgtgtgatacctgccgccagcaaccaatcat

SEQ ID NO: 881046 - DNA, 99 bp, Homo sapiens
ttccactgatatctcaaaaggtgatctggacaaaggaacaggtatctcaggtgtcatcaatcttacagaagaagtgctgtgggtcaaagtgaatataaa

SEQ ID NO: 881047 - DNA, 99 bp, Homo sapiens
tgttggagaactacagaaacctggtctccctaggtcagaaatgtgaattccaggatgcctatgttctgttgagtgaaaagaaaatttctagtatccagt

SEQ ID NO: 881048 - DNA, 99 bp, Homo sapiens
ccaattttcaatttactttcttgagtttttggctgttggacacatccatactccttgatcttcgcttcatcaggtccctttgtggactcttgcaccttg

SEQ ID NO: 881049 - DNA, 99 bp, Homo sapiens
tctcagcggccggtttctgcgtccgctgccgcaggttccaccgcgctccaggatgtacagttacccagcacgtgtacctcctcctcctcctattgctcg

SEQ ID NO: 881050 - DNA, 100 bp, Homo sapiens
tctgctctgtggactcaacagtttgtggcaagacaagctcagaactgagaagctgtcaccacagttctgacccagtgggtgatatatgccatccgaaacc

SEQ ID NO: 881051 - DNA, 99 bp, Homo sapiens
gacccttacattgcagacctccttcaagtggctgataacaggggtatcatcttatttcgtccttcacatctcactaacaagtttgaggacaagactgtg

SEQ ID NO: 881052 - DNA, 99 bp, Homo sapiens
acagttcctgctgctgcccaggtgcatctgagagttaaagttcctcgtaattttcgcttgttggaagaacttgaagaaggacaaaaaggagtaggcgac

SEQ ID NO: 881053 - DNA, 98 bp, Homo sapiens
cttccgggagcagctggaggaggaggaggaggccaagcacaacctggagaagcagatcgccaccctccatgcccagcactgtaatggcgttgactggc

SEQ ID NO: 881054 - DNA, 99 bp, Homo sapiens
acttgcatgggccttacttctataacagatgtcaagccctccaacatcctagtcaactcccgtggggagatcaagctctgtgactttggggtcagcggg

SEQ ID NO: 881055 - DNA, 98 bp, Homo sapiens
gggggactccaaagtgaaagtggcggtgcggatacgacccatgaaccggcgagaatatgacagatacctagcatctagcaaaataatggcagctgctt

SEQ ID NO: 881056 - DNA, 99 bp, Homo sapiens
ggcggatcaaggttctgtaagatcttcaccacacgaagagcttcctaagaagctgttgtatgagctgaaccagaggcaaacactgtttgccagaagact

SEQ ID NO: 881057 - DNA, 99 bp, Homo sapiens
acaggtctccgtattagaccttgtaatacgcttacctagatctgagaaggactttcaggatagaacatgagtaaaaggccaagctatgatagcaactgg

SEQ ID NO: 881058 - DNA, 98 bp, Homo sapiens
gatcttcgagttcaaagagaccctcggaacgaaacttggatttaactggccagaagcaggtattcaaagcagagaacaatccctgggtgacccccatt

SEQ ID NO: 881059 - DNA, 99 bp, Homo sapiens
agaccatgcactctctcaagaatcctcagagccaggctgtagaggcctgcacagctgaccacagttgggaaacgttgctgtctttggattcaggatctt

SEQ ID NO: 881060 - DNA, 99 bp, Homo sapiens
ctggaacttctgcccagctctccttggaaaacaaagtgttgcgtacagttcctctactagcagcatgcctcccccaggacaagtgtaaagtgaagatcg

SEQ ID NO: 881061 - DNA, 98 bp, Homo sapiens
ctgaagcctcttgtcccttcattgtcatctgcttttgagaaaagcttcactggcctgagcaagaacttgctaagaagtctattctaaatgcagaagat

SEQ ID NO: 881062 - DNA, 99 bp, Homo sapiens
agaggatccccaaccgcctgcgaaacccaagccgccgcgtaggagcgtgcgttcgggccctcttctcccacctgttcgatggagtctcactctgtcacc

SEQ ID NO: 881063 - DNA, 99 bp, Homo sapiens
tggtcagcacagcctgcggtttccggctgcaccgcggcatgaatgtgcccttcaagcgcctgtctggtcccagagggtggaaggagccaggacgcaccc

SEQ ID NO: 881064 - DNA, 98 bp, Homo sapiens
gctcatgcggtctggctccagaacaactcttcttcatagttacgttatactgcccctgcattgttggtattgaaagaatctgtcttgaactatcgttt

SEQ ID NO: 881065 - DNA, 99 bp, Homo sapiens
tgaaggaatgccgggcagtggtcattgcgggggggaccatgcagccgagtgtgatgctggatcttgccaagcgcagtcgcagtggtaaattccgcctcg

SEQ ID NO: 881066 - DNA, 99 bp, Homo sapiens
cttctgtaggctttgtaaaggattgatgagaaaagcagatggttaagagctctacaacttctgtgagagacgagttgtactgctgtcacaggaaatgga

SEQ ID NO: 881067 - DNA, 99 bp, Homo sapiens
ggaaaacctccttatgctgatatacatccaatgaggttctctcagctactggaagagaaaaacaccctttccattcagctctgcgataccagtcagagt

SEQ ID NO: 881068 - DNA, 99 bp, Homo sapiens
gctggatggggtgggccagctggctgtaagtctctgcccggtcactccagtggaaagcagatgtagtgaggtcaaggcgcttgaggaggaggcagcggc

SEQ ID NO: 881069 - DNA, 99 bp, Homo sapiens
aaaccgacaaccttcccagaaagtccaagctcgtggtgggtggaaaagtgttcgccgagactgtgccctgtccacggtgcctcctgcatgtcctgctgc

SEQ ID NO: 881070 - DNA, 98 bp, Homo sapiens
tgaactcaagtcaccgtggagctccgccgccccgaaactttcaccgcgagcggagagattcccctggagcttcagcgccttgttcatggtggccaagt

SEQ ID NO: 881071 - DNA, 99 bp, Homo sapiens
ggaaagtttccttggtcccaaaggcttcttcttgagtcagcgcgatcattcagcttggatggacctgccctccagctgcacacgcagccactaagccat

SEQ ID NO: 881072 - DNA, 99 bp, Homo sapiens
ggttcctacagagattcatatgagagttatgtggatttatcttctgtggcagataaatgaagtaattcactgctataaaatggaagacattgacattgt

SEQ ID NO: 881073 - DNA, 99 bp, Homo sapiens
gagcggccaggacgacgaggagcagggcctgactgcgcagcgtcgtctcggagatgcagccaagaaagccatcagtaaattgacaaccaggacagtaaa

SEQ ID NO: 881074 - DNA, 98 bp, Homo sapiens
gatgatggaactctggtggtttcaggaaggggaggacccgcagatcctgtagactatctgccagcagcacctcgggggctctacaaggaaagggagct

SEQ ID NO: 881075 - DNA, 99 bp, Homo sapiens
aagtggagatagctgagctcactacagatatgaaaaacagtagctccgtatcgaatacattgacaaatggatgtgtcatcaatggacatttggacttcc

SEQ ID NO: 881076 - DNA, 98 bp, Homo sapiens
aaatgcagaattcacaagatccaatcccttgtccttaaaaggacccctcgtccagtcattgtggaacccatggagcagtttgatgatgaagatggctt

SEQ ID NO: 881077 - DNA, 99 bp, Homo sapiens
acaatttgggattgatggtgaatcatttgaactgaagggtgtggatgaatggaacatagctcgcctcaatacagtcttggatgtggttgaagaagagtg

SEQ ID NO: 881078 - DNA, 99 bp, Homo sapiens
cctgtctagcacctgggcccggcccctctactgctccccaattacagcccacctcttgcatcgtcacctacagcgcctgaattctgctattatctatga

SEQ ID NO: 881079 - DNA, 98 bp, Homo sapiens
gaggaacccccaggacccagctggctcacaaccgcggggaaatttgcagtggtgagaaaatgtataaagaaagattctgggaaagaatttgctgcaaa

SEQ ID NO: 881080 - DNA, 99 bp, Homo sapiens
aaaattttaccccctcccccctgagcccgaggtgctgacgtcgcaaaaaaattggatactgagcttcagtcattgtctattcctggaacttaccaagag

SEQ ID NO: 881081 - DNA, 99 bp, Homo sapiens
accatgcagagctacatggatgcctcccttatctccctcattgaggattttgggagccttggagagcttctggaaaacatgacagaagtggttcggaaa

SEQ ID NO: 881082 - DNA, 98 bp, Homo sapiens
ttcggcatcgggcgacagcaggtcacagtggacgaggtgttggcggaagatgatagtatttctgctgcaagtacttctgatgttcaagatcgcctgtc

SEQ ID NO: 881083 - DNA, 100 bp, Homo sapiens
tggcaattgaagagtgagcaaggagattttacccagtgagaacatgtttaggacacttttctacagtggaagaaaagcttctgtctgcaggtccaaaggc

SEQ ID NO: 881084 - DNA, 99 bp, Homo sapiens
ggcggaacaggctaccaagtccgtgctgtttgtgtgtctggctcacgtggaaaatgaagagcagtacacccaggctctggagaagtttggcggcaactg

SEQ ID NO: 881085 - DNA, 100 bp, Homo sapiens
ctctcgatatcactttttggaatgaagcttctgtgcagtgctctgtcaacaggtccttgttataatgcgaaaacacatccagagagaccaggtttctgta

SEQ ID NO: 881086 - DNA, 99 bp, Homo sapiens
gcaaggctcttccctgaccattttctactgtccctgcgcgaggaagatgaagtcctcagtacattctgaagaagatgattttgttccagagctacatag

SEQ ID NO: 881087 - DNA, 99 bp, Homo sapiens
agcactattggcagctgcagagccagatgatccacaggatgctgtagtagcaaatcagggcttccgttacaagatgaggtctgtgtatgctcacttccc

SEQ ID NO: 881088 - DNA, 98 bp, Homo sapiens
tcggtcccggcccccatcctccccgccccatcggttgttgtctgggcggagctaccatagaggaggcatactccaggtcaatgacaaaactagcaaaa

SEQ ID NO: 881089 - DNA, 99 bp, Homo sapiens
taacagccaaactgagacacataatgttttctacgtagcgctggtatatggtcaaatgaatgaaccacctggtgctcgtgcccgggtagctctgactgg

SEQ ID NO: 881090 - DNA, 99 bp, Homo sapiens
ctgggcgacagagtgagactccgtcagaaatatttgtcagcgtccaacagacatggcaaggctattccatattcttttcttttcaggaaagctctgccc

SEQ ID NO: 881091 - DNA, 98 bp, Homo sapiens
agtggaaaggtggagttggtgctgtcacaaaaggtggggtggaagacaacccgtgagtattacaccttcatgtgggttactttgcccattgacctaaa

SEQ ID NO: 881092 - DNA, 99 bp, Homo sapiens
ctagaagttgaagcagaaattgaccaagcaggccaactgtgcaggaagatggaggggatgtaatctacaaaggctttgaagatggcattgtacagctga

SEQ ID NO: 881093 - DNA, 98 bp, Homo sapiens
tgcaagcggcctcacagtcatggatctggaagctgagggcacgtgtttgcggttcagccctttgatgaccgcagcagctgacaaaaagtttgcccgga

SEQ ID NO: 881094 - DNA, 99 bp, Homo sapiens
gaaatcgaaacagatacagagatgtaagcccatgtatcagcagatgttgcacacaaacttggtataccttgctacaatagcagattctaatcaaaatat

SEQ ID NO: 881095 - DNA, 99 bp, Homo sapiens
tcacacgacgtgcgctatgggtcagccacagaacagcctggttcactgcacagttcccagggacttgggatgggtcctgtggaggagtcctggtttgct

SEQ ID NO: 881096 - DNA, 99 bp, Homo sapiens
ggcggggattgggatgcggctggaggtgctgggctgtgactggacagggtatggctctctcggcatgatgaccagcgtgctggtttgtccagatggcaa

SEQ ID NO: 881097 - DNA, 99 bp, Homo sapiens
gagtgggctggcgcctcgggagagcgaatcgagggcggcgggtactccaaagattcaggtttactcacgtcatccagcagagaatggaaagtcaaattt

SEQ ID NO: 881098 - DNA, 98 bp, Homo sapiens
ggaggagaccggcacccagacaggtggcgacggcagaggaactggtcgaattgacaaatcttaccctacagtatgtggccacacaggaccagtgctgg

SEQ ID NO: 881099 - DNA, 99 bp, Homo sapiens
aaggaagcatgttggacgatatctaatattacagctggaaatagggcacagatccaggaagaaggagagacgaccatcttgcaactagaaaaagatttg

SEQ ID NO: 881100 - DNA, 99 bp, Homo sapiens
gggcaacatggcaaaaccccatctctggaccagcagtgagaagcctgtgtgcacggagccctgcaggatggaattgcgggtggtccccacgtacagtgt

SEQ ID NO: 881101 - DNA, 99 bp, Homo sapiens
gtgaattttaaaaaaggtgatcctgtatatgtttactataaactggcaagaggatggcctgaagtttgggctggaagtatctccttacaacatgcatta

SEQ ID NO: 881102 - DNA, 99 bp, Homo sapiens
ataccggaggaggatcttctgcggattgttggaatctaccgttcagattcagaacaagaaagtggacatctctaaggtctcctccaagtgtgggtctaa

SEQ ID NO: 881103 - DNA, 99 bp, Homo sapiens
ctggcggccgttgaaaaatggcgactgtggcagagttgaaggctgctccttgctcggattgaacgtatggaaaggcggatgcagctggtaaagaaggat

SEQ ID NO: 881104 - DNA, 99 bp, Homo sapiens
gataccttcaatcatcattttgagctcaaagaccatggctccctggcctgaattgggagatgcccagcccaaccccgataagtacctcgaaggggccgc

SEQ ID NO: 881105 - DNA, 99 bp, Homo sapiens
ctcctgagtagctgggattacaggaacctgaagaaagatctagctcagcattggagcattgctgatattgttggaattccacagcaattatccaaacca

SEQ ID NO: 881106 - DNA, 98 bp, Homo sapiens
cataggctgggtgtgcagggaccgatgcctccaacacagctatgcaggtgaaaggtgtagcagtcactcggcctacacccacagcatcgaccttgtga

SEQ ID NO: 881107 - DNA, 99 bp, Homo sapiens
ttgcagcctatggcctgttatttgtctcaacaaaagagctacagatgcacatgttgaatggagctcttctggcattgctgtttcctgtggtaaacactc

SEQ ID NO: 881108 - DNA, 99 bp, Homo sapiens
gtccagctggtcaccgacagggatcacttcatccgaaccctcagcctcaagccgctgctcttcgagataattgacgaccttgccaacctagtggagaac

SEQ ID NO: 881109 - DNA, 99 bp, Homo sapiens
catgatcctctccgcctctcgagctgttccatttcctccaagtcaccggcttacagcaaaagaagtgtttgataatgatggaaaacctcgtgtggatat

SEQ ID NO: 881110 - DNA, 99 bp, Homo sapiens
ggccagcgacccgctgctcagcgtcctcatgtggggggtaaaccactcggaatcctatccatcttcttcaccgatatggtttgtggattctgaagaccc

SEQ ID NO: 881111 - DNA, 99 bp, Homo sapiens
ggtggttgtgaccgtttactgcctggacaagtgcgttgaggacatgcctgctccactgaccacggctcttctccttgctccaacagggagatgacctca

SEQ ID NO: 881112 - DNA, 99 bp, Homo sapiens
agttgcagataaacagtccaccatttgaccaaccaatgagtcgaaggtctcgtagagcttccttagctgctgatactttggctgtgaggcaaaaaagga

SEQ ID NO: 881113 - DNA, 99 bp, Homo sapiens
tttgttctctactgcaagtagtgatgtctcagtgaaggtacctttaaaacagggcagaagccttatggattggattcgactgaccaaaagtggaaagga

SEQ ID NO: 881114 - DNA, 98 bp, Homo sapiens
gaaagatggatgctacttcctattctaaactctcagaaattgagcccaatgtattccttcgaccttttctggaagtgattcgctctgaagataccact

SEQ ID NO: 881115 - DNA, 99 bp, Homo sapiens
aaaattaactcatgagcttgagaagatagggttaaataaggagcgactcttacatgatgaacaaagtactgatgacagagccaggaaatgtcatttcaa

SEQ ID NO: 881116 - DNA, 99 bp, Homo sapiens
ccgatttcatcactcgtgacttcactcagccgttcttgggtgtctctggggagtccctgggccagaccttcctccagactccagcccacctcttcggag

SEQ ID NO: 881117 - DNA, 119 bp, Homo sapiens
aagaacagagatggcggggagagacggccaagcagcaccagcgtgcctttgggtgataaggggtgtgaccaattcagtgaaaggaacgaatgcgattctctggacctgtttgggactga

SEQ ID NO: 881118 - DNA, 99 bp, Homo sapiens
tccagggctttggtcacctgggccatattcttggtcacctgacaaggctgaagtcttcaggtatccatccaggcaggggagaatgtctttgtaataagg

SEQ ID NO: 881119 - DNA, 99 bp, Homo sapiens
tgagatcttgaaagtgggcgagttgcgttttgccagtcagtcagatgatgatcaggtgaatgtaatgggttttcacttcttaggaggtgctcgaattac

SEQ ID NO: 881120 - DNA, 98 bp, Homo sapiens
agcaaacagattcagtggcctgcattgcagagagagatcatcattgcctgaatttagctttgtgactgcaagagcaagaccagttcctgtctggagac

SEQ ID NO: 881121 - DNA, 99 bp, Homo sapiens
gttatcataaccttgaatggcgactagatgtacaggtcctctgctgtaccactttgaaaatctggcaaatgaactttccatagaattgagctatgagga

SEQ ID NO: 881122 - DNA, 98 bp, Homo sapiens
aagcggggacccagaccctggagcctcagttggaagcagccgatccagcctgcggagcctgtggggcaggtcggattgtttgtgctgaacgaactgtc

SEQ ID NO: 881123 - DNA, 98 bp, Homo sapiens
acatggactgaagtatccagcgctcattgggaatttagttaaggaactgaaatacgacgttggtggaggagaacggtttgattctttgacagatcttg

SEQ ID NO: 881124 - DNA, 99 bp, Homo sapiens
ctccagcgtctctcaggccgcgggtcctagtccgaccgggcccccaggaatgtccaaaagctttgacaccagaagaggcaacttcagggctgcgacact

SEQ ID NO: 881125 - DNA, 99 bp, Homo sapiens
tctgccttccagcctgcttgactttgaaaatgatttaattgaatcaagctgcaaagtaactagtcccatatgaaggctcaaaagagcggtaaagaacaa

SEQ ID NO: 881126 - DNA, 98 bp, Homo sapiens
ggcgcgctgcgggagctgggcttcccgtacatgacgccggtgcagtgccatcagacaagatcagttgatcagaacagaaagctagctcggaaaatcct

SEQ ID NO: 881127 - DNA, 99 bp, Homo sapiens
gcttggtacctgcagcacgtttccatgcctgggagctctttgccgagggcgtgtggtgagagtccccacagcgaccctggttcgagtggtgggcactga

SEQ ID NO: 881128 - DNA, 98 bp, Homo sapiens
gcttgttgaggctcgagttcagcctaatccatcaaaacatttgcaggaaatcacgtttaagaattactacacagcttttttgagcatccgtgtccgtc

SEQ ID NO: 881129 - DNA, 106 bp, Homo sapiens
ctcagccgcctcctagcggcagagcacgagcaatggaggtcacagctctcaaagcaataggtctgattgctgtcccgtaggagcgagcgccgcgccgctaggaggc

SEQ ID NO: 881130 - DNA, 98 bp, Homo sapiens
aactgtaagaagaggaaagacttgtctcagctgccactgcagagccccgccatggaagacacgccgttggtgatatcgaagcagaagacggaggtggt

SEQ ID NO: 881131 - DNA, 99 bp, Homo sapiens
ttgagtatgctccatgtagatcacctcttgcaagcttaggatatgaaaagagctgtgtgttgttcaattgtgcagccttagctagccaaattgcagcag

SEQ ID NO: 881132 - DNA, 99 bp, Homo sapiens
tccctttaatccagtgactgtcaggtcgatcatatgcattgaatgccccagaggagcccgaaacctcccaggcttggtgcaggaaggagagcccttcag

SEQ ID NO: 881133 - DNA, 99 bp, Homo sapiens
tcgcatctgctcaacgacgaggacctgacgcaggggcccagatcattgatctgatgatgctggtcatcgatgtgaccaaggggatgcagacccagtcag

SEQ ID NO: 881134 - DNA, 99 bp, Homo sapiens
cttccctgatgggaaaccttttcctcaccaccccggatggagaagatggaatttcatctacgtcttccacacacttgtgtcttctacaaatgcttctgg

SEQ ID NO: 881135 - DNA, 99 bp, Homo sapiens
cctgcaactagatggtcccatctggccgggctgggcgtggtggctcatgcctgtaatcccagcactcttggaggccaaggcagaagaatagcttgaggc

SEQ ID NO: 881136 - DNA, 75 bp, Homo sapiens
cggctccccgagagctcaaggcaaactatgccttcaagatctatgtagagacggggtttcgccgtgttagccagg

SEQ ID NO: 881137 - DNA, 99 bp, Homo sapiens
ccacatccggtgtaaaaaaagctatatttgatcgactgtgtaaacaactagagaagattggacagcaggtcgacaatgcctgtcttagatgtcaagctg

SEQ ID NO: 881138 - DNA, 143 bp, Homo sapiens
gctccggtctacagctcccagcgtgagcgacgcagaagacgggtgatttctgcatttccatctgagtttgatgccatcctggacgtcctgtcatcggcgattgtcctgtggcgttacagcaacgcggccgctgtgcactctgc

SEQ ID NO: 881139 - DNA, 99 bp, Homo sapiens
atcaagttttagttccaattctgccacatcaccttctacttcttccaaagctgccaagttgtgtaaaaactgcattccgtgccaggcctgaaatgttcc

SEQ ID NO: 881140 - DNA, 99 bp, Homo sapiens
gacagaccaacctgtcagtgctgcaaattgcagaacagaggttcgggatcaacatcccacacaagttcagcatccacaactacaaagtgccaacattct

SEQ ID NO: 881141 - DNA, 99 bp, Homo sapiens
cccaggcagccggtggcagatgacacctgtttggagaagctcctggactggtttaaaacggtcactgaaggagatctgccgacaccccaggccatcgag

SEQ ID NO: 881142 - DNA, 99 bp, Homo sapiens
tccgacagagtcctccgtgtcctcccccgcatgacccccttggttgaattctcttacccgcccctgattccaggagatggacatgacagccacacttta

SEQ ID NO: 881143 - DNA, 98 bp, Homo sapiens
gtgctgacggacaacaacctcgggcagctgcaatgactctccgcacggtattattgtcattgcaagcactattggcagctgcagagccagatgatcca

SEQ ID NO: 881144 - DNA, 99 bp, Homo sapiens
agataatcctcatgcaaatagcgggaagaacaaaggaaggggagcccgggacccccgggggcgcaggtctcctctgagcctccggcctccataagaccc

SEQ ID NO: 881145 - DNA, 98 bp, Homo sapiens
caagaccccagcaccaaccagacctggattcgaggcacaaacccagcagcctcaacctagttcatggaggagcctcgcggggtcctggccaagcaagc

SEQ ID NO: 881146 - DNA, 98 bp, Homo sapiens
cggaggcaggttcggctggaaggaaccgctctcgcttcgtcctacacttgcgcaaatgtctccgtgtttcctgaggttataggcgggtgtttgaggag

SEQ ID NO: 881147 - DNA, 99 bp, Homo sapiens
gccaacatggcaaaaccccgtctctacgttgctgtgggtgccggcagagccggcagtacagctggcatctgatttacacacagtggtcgcatctggaat

SEQ ID NO: 881148 - DNA, 99 bp, Homo sapiens
cacactcctgagccaggaacagatcaagtgcacagccagagaacaacacatcacacacaggaaacagttgtgctcatgtgatgggggcctcagcactag

SEQ ID NO: 881149 - DNA, 99 bp, Homo sapiens
ggagtgccagacagtgggcgcagctggcaaacttccccagactctgcgaggaaacggaaaggattgttgctaaccacattcgtgagcgagaagggaaga

SEQ ID NO: 881150 - DNA, 99 bp, Homo sapiens
tccagtatttgcggatagctccaaactgggatatattgctcatttagaaagtggatgtgtgggataacatgtccaatgtgtccgaggagagaagaaaaa

SEQ ID NO: 881151 - DNA, 98 bp, Homo sapiens
tcgtggatgcttatggagtcggaagctacagagaagtcaatccagagtgataccaccaatgagatgagcaccacagttattcaagccagcccagccct

SEQ ID NO: 881152 - DNA, 99 bp, Homo sapiens
agcgactttggggcccgtcaccctcaggttacacgcatggggagatactctggaggaagcatttgagcaatgtgcaatggccatgtttggttacatgac

SEQ ID NO: 881153 - DNA, 99 bp, Homo sapiens
atcgatgtgcatgcacttacggatttactggaccccagtgtgaaagagggattcacctacgctcttaccagctggagggagtaaactggctcgcccagc

SEQ ID NO: 881154 - DNA, 98 bp, Homo sapiens
ttaaacaagacaacgctgaaggctcggtgcagcagccctgcaaagaatggctttaagtgtcattgtatgtccgaatctcatcagagacaactattgct

SEQ ID NO: 881155 - DNA, 99 bp, Homo sapiens
cggcacttttgaagatggcaagaagtttgattcaagctccgggaagcagtttgttcgctatataaacatgttgataaacgacacgacgtttttgctcga

SEQ ID NO: 881156 - DNA, 98 bp, Homo sapiens
tggcgaggcgagtgtggaaggactcctgaaccagctcgtcctggagcacctgcagctggcgcctctgcagtgggcaaacttggaaatcatgtcttaga

SEQ ID NO: 881157 - DNA, 98 bp, Homo sapiens
ggcggccggcttggagaggccgagggtttgatgaaggtggaggcagcgcggctctcagatccactccttataccgccgcacaggtgccagctttcaga

SEQ ID NO: 881158 - DNA, 99 bp, Homo sapiens
gagcagctcctcctggaaaaagcaagctgaagacatcaagaagatcttcgagttcaaagagaccctcggaacgatgtttcgtctgaactcactttctgc

SEQ ID NO: 881159 - DNA, 99 bp, Homo sapiens
atcaaaagtccctttgtcaatacaaatatgaaatccagacagctgtgtggagagattcaaaaagtcttctacaaggtaagaattgctgagctaagtaga

SEQ ID NO: 881160 - DNA, 107 bp, Homo sapiens
aaggaagaaaacctttgaccatgaagagaaatgaggtcacctgggccatattcttggtcacctgagggtttggctatcatctcatttctcttcatggtcaaaggttt

SEQ ID NO: 881161 - DNA, 98 bp, Homo sapiens
aggaatagcttgccaaaccaggttgcatttcctgaaggggaagagcaagatgcagtcagtggaggccctccctatcctgaagacattagctgagagtc

SEQ ID NO: 881162 - DNA, 99 bp, Homo sapiens
gctgtgagagtcgtcaacaggaaatgccagcagaagagcacaattggccacaaagaggccacaaggcacctccatgtgctcgatgtgtcgcaggtggga

SEQ ID NO: 881163 - DNA, 99 bp, Homo sapiens
tgagaacgtcagcgggctgcagcgcgccaaaaccgggacggacaagaccctggtgaaggaggtcgtacaggggaacttcaacatggagttacttttgat

SEQ ID NO: 881164 - DNA, 99 bp, Homo sapiens
cagagcatgctaaggccttcaacttcagactgcagagccggggcacctacaattttctgacatcacccagcctcaggatctatcttgggatcccatggc

SEQ ID NO: 881165 - DNA, 99 bp, Homo sapiens
agaaaagatgccctctgaatctttgtgtttggctgcccaggctcgcctcgactccaaatggttgaaaacagatatacagtagagacgaggtttcaccgt

SEQ ID NO: 881166 - DNA, 99 bp, Homo sapiens
agtggctgagcaccgtctcccagtacgaccgggacaagtactggaaccgctttcgagacggtggagccagccatcctgagacgtccgtacagcccgtac

SEQ ID NO: 881167 - DNA, 99 bp, Homo sapiens
accggcctcctgcaagagtttgatgtccagcatgcttttcacttccactgcatctctcgctggctcaaaacacgacaggtgtgtccattggacaacaga

SEQ ID NO: 881168 - DNA, 99 bp, Homo sapiens
ttcacgctggcgcgagccccgtcctccttcgccgccgcgcacaaccgcacgtgcagggatcactgagattctgatgaacagaccttctgcccgcaatgc

SEQ ID NO: 881169 - DNA, 99 bp, Homo sapiens
cttcggcggggcccaggtgagaaaggcccacctgtgtcctggttgagggtctccagggttctttggggcccgaggatggattggatgctttggtatatg

SEQ ID NO: 881170 - DNA, 99 bp, Homo sapiens
agcctcccaagtagctgggattacagatgaggatgacgatgaaccagaagaggatgaccaggaaataaaagataagactctgcccaggtggcagatctg

SEQ ID NO: 881171 - DNA, 100 bp, Homo sapiens
cagtatgtgctgacagccctggctgctcgtgccaagcttcgagcctggaatgatgtagctcgaagcttggcacgagcagccagggctgtcagcacatact

SEQ ID NO: 881172 - DNA, 99 bp, Homo sapiens
cggtggtgatctctggtgcaggaaaaatgttcactgcagatggagatgggtgtcgtgagctggtggtgggctacacagaccgtgtggtgcgagctttcc

SEQ ID NO: 881173 - DNA, 99 bp, Homo sapiens
acctccagaactacctgtaaattatgtgaaacctccaaatgtgggctccatggtccccttctcgatgcgcatcttgcacgcggagcttcagcagtacct

SEQ ID NO: 881174 - DNA, 99 bp, Homo sapiens
atcttcgggccctcctcatttatgccatttcagctacagtgttcacaatcctggccaatttggagcaaggcttagcagaagacggcggcatgagcagcg

SEQ ID NO: 881175 - DNA, 99 bp, Homo sapiens
gacagattacgccccctatcctatccgcaaacaagtaaagccaatcccagctgaaggaatcaagtcaaatccttccaagcggcatagagaccgacttaa

SEQ ID NO: 881176 - DNA, 99 bp, Homo sapiens
gcataatgacattgtggacagtgacagcgatgctgaggatcgaggaacgttgtctggggacggcaaaacagaacagaaaggcggagataaaaagagggg

SEQ ID NO: 881177 - DNA, 99 bp, Homo sapiens
cctgttgctggagatcctgggcctcctgtgcaaaagcatgggcttccgttacaagatgaggtctgtgtatgctcacttccccatcaacgttgttatcca

SEQ ID NO: 881178 - DNA, 99 bp, Homo sapiens
aaggaaaagtgactcgcatcagtagattactatgaagctgcaagaggagagcacacagctgctacaaatgccgtcagtgcagttttacagctgccgata

SEQ ID NO: 881179 - DNA, 99 bp, Homo sapiens
actgacctgcctgagaggttccaggttctagcaagaggagaagaaaggaggaaaccacagggaaaaatgttaagaagacacagcatgaattagatcaca

SEQ ID NO: 881180 - DNA, 98 bp, Homo sapiens
tataagaccctcctggcccccctgagcagaggactgtaccttggatgcccgggtagttaaagacatggcaactggaaaatccaaaggctatggttttg

SEQ ID NO: 881181 - DNA, 99 bp, Homo sapiens
gtggaatcaaatgacagcgaggacactcccagcaagctcttcgctcttgtaaatgtaaaactctgggccattgatcgacaatgttttcaaacaataatg

SEQ ID NO: 881182 - DNA, 99 bp, Homo sapiens
tgaacggcattctcttcaatcatgagagtcccagaagagcttgcctacatgtagcctgtgttgtacagcagaaagatgccaggcaatggtttgctgagc

SEQ ID NO: 881183 - DNA, 99 bp, Homo sapiens
cgtgggcgtaggaccctctgagccaggcaagaaaattggatgtatattttgaatatgaagaaaaaataatgagcaaaactactctggataaatctcttc

SEQ ID NO: 881184 - DNA, 99 bp, Homo sapiens
gtagaaactgcttagtaaaattctccagctcattttcaagttgaacagctttatttcttctaacgatgacgatattcgcgctctcggtcacgctctcgg

SEQ ID NO: 881185 - DNA, 99 bp, Homo sapiens
ctgatcctatagaagatcctgatcctgaggttatggcaaagggtggtgacttcacacgccataatggcactggtggcaagtccatctatggggagaaat

SEQ ID NO: 881186 - DNA, 99 bp, Homo sapiens
gggaggggcgctgtgtcgagggcgatccccccaaagcagcgtcccgtgctaaaggttgctgatcagctctgtgccaagtatagcaaggaatatggcaag

SEQ ID NO: 881187 - DNA, 98 bp, Homo sapiens
gaggaaacagctggctaagctcatcattgttactgaacctgcacttgttgccaagtcttccatcttactagatgtgaaaccttgggatgatgagacag

SEQ ID NO: 881188 - DNA, 98 bp, Homo sapiens
gagaattcatggggtgaagaccatggccacaaagcggaatggccaaagactatgacgggtcttcctagcacatcagggacaactgccagtgtggtcat

SEQ ID NO: 881189 - DNA, 99 bp, Homo sapiens
ccggcttctattgccaatttgacggcctctagagctttacttttaggaacttcatggtatacagatggtttggataaagatggaatcgtaaaactcaat

SEQ ID NO: 881190 - DNA, 99 bp, Homo sapiens
gtatctttctttcctggaccatgaggatcacgtcacacaacgttttctgaagatatgttattctccgctgaaccagttctgtcagatctttggcctctt

SEQ ID NO: 881191 - DNA, 99 bp, Homo sapiens
agatcccaaaggaattccagagttctggtttaccatcttcagaaatgtggacatgctgagtgaattagtccaggatttcggctgaatgcgtcttcttgg

SEQ ID NO: 881192 - DNA, 99 bp, Homo sapiens
ctagcgccgctgggcctgcaggtctctgtcgagcagcggacgccggtctctgttccgcaggatgtggaaggaatgaaggccagctgaatggtgaaacaa

SEQ ID NO: 881193 - DNA, 98 bp, Homo sapiens
gtcctggaaggaaaaagatctaaagtcacccggcggccaaaggccagtgactaccaacgtttggaccagaaggtgaattatgtaacctcattacgctg

SEQ ID NO: 881194 - DNA, 99 bp, Homo sapiens
tgaagaattgcttccggatgactgaccaagagttccatgccattgcagtgtcaactaggcctcagttacttttcagtttgcccaaattgagcccatctc

SEQ ID NO: 881195 - DNA, 99 bp, Homo sapiens
atgaagtgcggtttggtttccttgtcaacggaggatgaagtgaacagctgagcagctcgcagagagcagtccaatatcagatggaaatgatgcggagcc

SEQ ID NO: 881196 - DNA, 98 bp, Homo sapiens
gagatttttacatttgaatacagtgcagcttagtaaactgttgcaagagaatgtgccgtcatatgaaaaaggaaccatcactgttgctggaggcacct

SEQ ID NO: 881197 - DNA, 99 bp, Homo sapiens
gagactactggccgaaggggcgtctgcggctctccgccgtccccagccctgcctctccctgggctctgatctccaagaaggagaagcttctctcgcagc

SEQ ID NO: 881198 - DNA, 98 bp, Homo sapiens
ggcagacatggcgacattgacagtggtccagccgctcaccctggacagagtgttcagactgcatcacagtgcttccgatacaagcgacaaaaatcgag

SEQ ID NO: 881199 - DNA, 99 bp, Homo sapiens
gagagtatgagattgctgaaggcatcagtgcaactgtatttcgcacagtgctgaaacctgctcctccaaagccagagcccaagcctaaaaaggcccctg

SEQ ID NO: 881200 - DNA, 98 bp, Homo sapiens
ctgaagccgccatgcgacctctccatgcagtcagtggaagtggcggtgcaacagctgcagcccggaaagaggtgataaggaacaagatccgagcaata

SEQ ID NO: 881201 - DNA, 98 bp, Homo sapiens
agatgtctcgctccgtggccttagctgtgctcgcgctactctctctttctggcctggaggctatccagcgcctccagttaccaactcctgtctggttt

SEQ ID NO: 881202 - DNA, 99 bp, Homo sapiens
tttagatctggaataatatacatggtattgacctccatgcaacatcattagttttctcaattcctcagcggaaggatcttggcattctccgctccgctc

SEQ ID NO: 881203 - DNA, 99 bp, Homo sapiens
cttggcccaggaagcctggaacgcaaggaccggagggcgtgggctgggacgcccctaccttggtctttcaggagaattttctctacatgtgcacccatt

SEQ ID NO: 881204 - DNA, 99 bp, Homo sapiens
gcctacctgcagagcctggccaagaagatctgctcccattcggccccggaacagcaggcgcgcacgcgggcttctttatgaaaaaggcatcagcctcag

SEQ ID NO: 881205 - DNA, 99 bp, Homo sapiens
gtttctggtgagacctctcttcctgacctggagatggcagccttttctttatcttcacatggcctttcctcacagagcatggtcacacaatctacaatg

SEQ ID NO: 881206 - DNA, 99 bp, Homo sapiens
tggtgtttggtgtacccatgtgactaatttgtccaaagagaggtgttttattccaaacgtctatgctgctttgttcactgcagctcttgttcctttgac

SEQ ID NO: 881207 - DNA, 98 bp, Homo sapiens
aaagtgctgggattataggcgtgagccaccgtgcctggctgaaggtctggagcccccaactcccttgacagtgtacgctggagcaggttccagggtgg

SEQ ID NO: 881208 - DNA, 145 bp, Homo sapiens
atgcaaaattttggtctgatgatagcagatcctatctgttcaattcttatattccaggtattttcttctccaccatttttttaatagcacccatgcttaagggattgcaacagctgtctccttacaactataagaatggctataa

SEQ ID NO: 881209 - DNA, 99 bp, Homo sapiens
agccgggtatctgtggtctttaagatgtgacactttttcaaaaatggcaatggtatcagaattcctcaagcaggcctggtttattgaaaatgaagagca

SEQ ID NO: 881210 - DNA, 99 bp, Homo sapiens
ctagctgaaataacccttgatcctcctcctaattgcagggcatccgcttcgatcctgaaattccgcaaacactacgactagagtttgctaaggcaaaca

SEQ ID NO: 881211 - DNA, 99 bp, Homo sapiens
tctggttctcgtttggtaaactggacagcactaagagtgtataaaagatgaggatcatgtccgatactagcacttattccaccacattcatgttggcaa

SEQ ID NO: 881212 - DNA, 99 bp, Homo sapiens
ggagccggactgcggttggggcgggaagagccggggccgtggctgacatggagcagccctctgacgtccatcatctctgcggtggttggcattctgctg

SEQ ID NO: 881213 - DNA, 99 bp, Homo sapiens
ctgtacccttaaaatagggtgcatgctgggtgacagcaggtgcatggcatgaggaacctagttcaagaagcttctttgtgagcaaaagtgccttatcca

SEQ ID NO: 881214 - DNA, 99 bp, Homo sapiens
ttcaaacccattgctgagaagctaacagggaagaaggagaaagggccaacccctgaagaagcaatacagaaactgaaggagacagagaagatactgatc

SEQ ID NO: 881215 - DNA, 100 bp, Homo sapiens
cagaatacatcttcgtcatctccagggcagtgttgtaccagtgcagggcctctagccagtcttggcaccggatacattccaggtcttgaagatgtattct

SEQ ID NO: 881216 - DNA, 99 bp, Homo sapiens
gcagtcggtgaccgcgcgactcggcgcccgcccgcggcttccgaggcaatccggcagtgtcagtctacagccgctaagctgagaagatctgggaaggag

SEQ ID NO: 881217 - DNA, 99 bp, Homo sapiens
cctcagtggactggggggagaagatgcaactgtgaaagttccttttcttaagaaatgcaaggaagcaggacttcttaattacttacttgaagaaatatt

SEQ ID NO: 881218 - DNA, 99 bp, Homo sapiens
cagtctagcaggctcagcttccactgggttcttctgttgatctttggtggtataaaaagctcagcattattcattaagtggaagtggatcatcataaag

SEQ ID NO: 881219 - DNA, 99 bp, Homo sapiens
ctcatcattaatgcaagtggaaggaaactcttcaccaaagaattgatcacatcatgaaagggaaatcctcattgacgattcaatttgttgaaggccaat

SEQ ID NO: 881220 - DNA, 99 bp, Homo sapiens
ccacgctccgctgctcctggggaagcagctcacaaaaccgcctgtgggctcatcagtgaaaagaggctcgggcagctttcggaagaaggacttgagcag

SEQ ID NO: 881221 - DNA, 98 bp, Homo sapiens
cacaagcaggtccaaagagagaataacacttacttgtgcctggctgtgctggatggtatattctgtgtcatttttcttcatgggagaaacagcccaca

SEQ ID NO: 881222 - DNA, 99 bp, Homo sapiens
agatctggacttcggagcacgtctttgaaatgatatggaacctagcaaagctgttccactgaatgcatctaagcaagatggacctatgccaaaaccaca

SEQ ID NO: 881223 - DNA, 98 bp, Homo sapiens
gtgacgctgctggaggaaacacctcaggacacggcctacaacaccaagaggagagcgacttgcagttgtggaggtacagtgtgaacggctgaggatgc

SEQ ID NO: 881224 - DNA, 99 bp, Homo sapiens
acagggtggccgcttggtccagagactctacaggggcaggtaattcactggtccacaagcggtctcctttacgtcgaaaccaaaagaccccaacatcct

SEQ ID NO: 881225 - DNA, 98 bp, Homo sapiens
tcagagaaaaagcagccggtagacttaggtctgttagaggaagacgacgagtttgaagagttccctgccgaagaactcccccactggaaaggattctg

SEQ ID NO: 881226 - DNA, 99 bp, Homo sapiens
ccctcgagtcttctttgacgtggacatcggaggggagcgaggattgaatccaacgacctgcctctgttgactgctattgccagtactcattctccttat

SEQ ID NO: 881227 - DNA, 99 bp, Homo sapiens
tctacttcctggattgttctttctagtcgaagaattgaattttacaaagaatccaagcaacaggctctgtccaatatgcttcactcctgaagccagcga

SEQ ID NO: 881228 - DNA, 99 bp, Homo sapiens
catctgcctgggcaagttcaccttccctgggatgtccctggacaatctactcaatgtgaagacaacaaggatgaagacctttatgatgatttacttccg

SEQ ID NO: 881229 - DNA, 99 bp, Homo sapiens
agaacccagagcacaatgactttctgaagctgagaaccatgctcatgacagtcattttgtttactcattcagccctgttgcaggtcccaataaactctt

SEQ ID NO: 881230 - DNA, 99 bp, Homo sapiens
acagtaaatggacaagaatatcatcttcaacttgtagacacagccgggcaagtttactcctggcttgggggcattaggaagcactggaggctcttcggg

SEQ ID NO: 881231 - DNA, 99 bp, Homo sapiens
ggagctccgagcattgtcattcaaggtgtacaggtagatcttgtagtcagtgcctggttgtaaacctgctcagatacatcaaacatggagacagcactc

SEQ ID NO: 881232 - DNA, 99 bp, Homo sapiens
agatggatttttgcatgagacgcttctggacagggaatgtgcatcagccttcacctgcaagccccgggccccctgcactccagagatgctggactggaa

SEQ ID NO: 881233 - DNA, 98 bp, Homo sapiens
tattcttatagaaaatatggatctttacatgttgaatccttgcagcactaaaatttggtaatctgtaagtcagatgctccaacaggggatgttcttct

SEQ ID NO: 881234 - DNA, 99 bp, Homo sapiens
agaccatcctggctaacacgaatctgaattatccagaacagaaagttgtgactgttggacagttcaaaattggtctgatccatggacatcaagttattc

SEQ ID NO: 881235 - DNA, 99 bp, Homo sapiens
ctttaattcgccaggatcttataaaacaaatgctgctgctatgaatatgggtcgaccattccaaaaaaatcgtaatggcatagaggagcctttggaaga

SEQ ID NO: 881236 - DNA, 98 bp, Homo sapiens
agagattccttgcagagacagctcaacacggcacttccacaggtcaaaatgcagatcttcgtgaaaacccttaccggcaagaccatcacccttgaggt

SEQ ID NO: 881237 - DNA, 98 bp, Homo sapiens
tcaaagtgatacagcaataccaccttcagtacttggcaagatttgatgctcttgtgctcagtgacatcattcaggcagagaaggacaagatcctgaag

SEQ ID NO: 881238 - DNA, 99 bp, Homo sapiens
gtcctgtttctcagatcgctcacccctgttctcggaaaccatccacgaccctgagctcgcccgtcagcgaggagtcctggagcgcacagagaagatggt

SEQ ID NO: 881239 - DNA, 99 bp, Homo sapiens
tctgccttctctggtgtagatgaaacgaataccttgagccccattttgaattttgcagtctcgtggctaccccgtcttcagcactctgcagtgggtacg

SEQ ID NO: 881240 - DNA, 99 bp, Homo sapiens
gccagaggagtgctggggatgacaccaaagctgtattttattacacaccctctgctgtgttccaactttactgttcttgaaattcaaaaagtccacact

SEQ ID NO: 881241 - DNA, 99 bp, Homo sapiens
aatcgaatagttgatgccctaaatgaattcagagctaaagttgcagacaagatccagctcatcaataatatgctggacaaagtcaatgagatgattatt

SEQ ID NO: 881242 - DNA, 99 bp, Homo sapiens
gtgaatacaagcaaaaggccccccaagaggacccctgatatgatccagcagcctcgggccccgctgattgagaggatccagaatccagatctctggaat

SEQ ID NO: 881243 - DNA, 99 bp, Homo sapiens
cgggactcttggcctgtccctcacatccgatgcaccctttttgtcagattatcaggatgagggtcagctgttgccagcaaaccgcaatacaccaagtcc

SEQ ID NO: 881244 - DNA, 99 bp, Homo sapiens
taggagaaaaaattgcccttagccgaagagttgaaaaacactggcgctcggacctcaggcacatgcgaatgacccggagtgtggacaacgtccagttcc

SEQ ID NO: 881245 - DNA, 99 bp, Homo sapiens
ctctgctgcatcatgatgtcaacaaccgtggctcacaagatgaaagagcacggagtgcagcctgccacaggcgaggttgtgtttgatagtttccaggac

SEQ ID NO: 881246 - DNA, 99 bp, Homo sapiens
tgaactcattgttaagcacaagttcacgaaagcctacaaaagtgtggagaggttccttcaggaggatcagatcactccaagaactgaggcccctgtcag

SEQ ID NO: 881247 - DNA, 130 bp, Homo sapiens
gaatgcactgtatctcatgcagtagaaaagataaatcctgatgaaagagaagaaatgaaagtttctggtccatcctgacgggtctgttgccaccaacctctgggactgtgctcgttgggggaagggacat

SEQ ID NO: 881248 - DNA, 99 bp, Homo sapiens
gccgcggggctccaggacggcgcccttagcgacaccatgttgaggctaagacgtctgaagccaggccctttaatgattctactcatgctgagcccttga

SEQ ID NO: 881249 - DNA, 99 bp, Homo sapiens
cgacgcactggcccaggacctgcacaagggccgttgctccagggagaactgcaaatatcttcatccacccccacatttaaaaacgcagttggagataaa

SEQ ID NO: 881250 - DNA, 99 bp, Homo sapiens
atgttttcatcacttctctccagaaggaacctctttcaggagctataaaagaaagggaggaatcatgtccacaattgcagctttctatggcggcaagtc

SEQ ID NO: 881251 - DNA, 98 bp, Homo sapiens
gaaggccgtatttgggtctatgacgttggagaggaaatttgtacatagattctaggcaaaatctccctccttcagtgatgccaccccctggttatcct

SEQ ID NO: 881252 - DNA, 99 bp, Homo sapiens
agttaatgccaagaagcagccgccagttgggatcaaatgtgagcctatggatcaagggaagctatgcgaaattatttaaaagagcgaggggatcaaaca

SEQ ID NO: 881253 - DNA, 99 bp, Homo sapiens
ctatggagaagaccagtccaatggctctcaaaattagagagatgtgtaattgtccaccactgtctaatccagaccctcgattactattcaaactcagca

SEQ ID NO: 881254 - DNA, 98 bp, Homo sapiens
gcattctccagggaaaggatgacatatttttggacctgaaacagaaattctggaacacctatatgggcgtggactccctggtgctagaaagcgtgatg

SEQ ID NO: 881255 - DNA, 98 bp, Homo sapiens
gagacctggacttttgggtcaaaaggtgccatgctatgtgtttgatgaagagttgaggaagcatgatctcaatcctctgatcaagcttagtggtgcct

SEQ ID NO: 881256 - DNA, 98 bp, Homo sapiens
gccaggaagtcggagtttgagccccggaggcagagcggctgccatgaaatcaatggtgcctgctctgcctgtggggggctggtggtgcccctcctccc

SEQ ID NO: 881257 - DNA, 98 bp, Homo sapiens
gctaaaccagaaatccctgtgattgtggaaaataactccacggatgtcttggtagagaagtttcaggcacctgcaagagagacctgcgtggaatgtca

SEQ ID NO: 881258 - DNA, 98 bp, Homo sapiens
taatgaggatgaagattcaccaaataagctatatactttggttacctatgtacctgttaccactttcaaaaactcccaggaaggaaattacaagtcag

SEQ ID NO: 881259 - DNA, 99 bp, Homo sapiens
ccagactggttcttgaacagacagaaggatgtaaaggatggaaaatacagccaggtcctgttccctcttctcccagccaggagcctcccaccaagcggg

SEQ ID NO: 881260 - DNA, 98 bp, Homo sapiens
tcagtgcttcccgggagcaagctggtggactggctgctggctcagtgtcacatttgaagacgagcactgaggatgaggaaccaactgaagaatatgaa

SEQ ID NO: 881261 - DNA, 99 bp, Homo sapiens
gagttaatctcctcagaaatcactaaatactactctgaggggcttagaaattaacagggtaatagcagtgagtgcccgcctccaggaaatgctgaagat

SEQ ID NO: 881262 - DNA, 99 bp, Homo sapiens
cagaggttctgccatgcaagtgacagagtctcactcccatcgcccagacttgagtgtagtgatgtgatcactgctcactgcagtctcagccttccagga

SEQ ID NO: 881263 - DNA, 99 bp, Homo sapiens
ttggcctggggtacatcatctaaagatcctaggattgctgcaggtcagcagtctccactggaaaaaaagatcttggattgcacccaaaattatagagac

SEQ ID NO: 881264 - DNA, 99 bp, Homo sapiens
ctggcatggatggcggcatgagtatctgggatgtgaagatgcgaagaccttttgatttgcccctccagcccctcgctcgttctggcagtccttgccacc

SEQ ID NO: 881265 - DNA, 99 bp, Homo sapiens
ctcccaggtggtggtcttggtattgtggtcaacataatagacacgtccgttgggcagctctcgctgttcccatctgtagccccagctacttgggaggct

SEQ ID NO: 881266 - DNA, 98 bp, Homo sapiens
atggccccttcccttgggaactggggcaatggcggcttcctgtgttctactgcacactgggcagaagatgcctctgattggtctgggtacctggaaga

SEQ ID NO: 881267 - DNA, 99 bp, Homo sapiens
tagtcaaagatggagaagaagaaattgtttatgcagttgacttcaaccacaagagggagatgattgccaaggatccaagatttgaacgattaccatgta

SEQ ID NO: 881268 - DNA, 99 bp, Homo sapiens
agtgcctcctggaaccacagagtcggttcagtctgtggattactactgtgatatgatgatggccaaagagaagccaccgataactgtagttggagatgt

SEQ ID NO: 881269 - DNA, 99 bp, Homo sapiens
gttcagtcgatttttcctccataattgtctccagtggttcttccctttgacactgaacctcttctgtgaactcctgtagtcccagctacttgggaggct

SEQ ID NO: 881270 - DNA, 99 bp, Homo sapiens
tgggacatggccgctccgggccggacctggcgtgtgatcagagtctggaattaatgctttggcaggaattctgctgccaatggcccagtccaagtcatc

SEQ ID NO: 881271 - DNA, 75 bp, Homo sapiens
actggggttctgagactccctgtcccggaccgcagtgcacttacatttcaatcgaccaagttccaaggacctatg

SEQ ID NO: 881272 - DNA, 99 bp, Homo sapiens
ggggtggtgtgtgggggaagccgcccccggcagcagacttaattcagtgcacaaatgagatgaatgtgaacatcccacagttggcagacagtttatttg

SEQ ID NO: 881273 - DNA, 143 bp, Homo sapiens
ggggcccggacagaagatggtgcagaagaaaccagccgaacttcagggtttccaccgttcgttcaaggtagcctcatggctgcaacctgtgagattagcaacatttttagcaactacttcagtgcgatgtacagctcggagga

SEQ ID NO: 881274 - DNA, 100 bp, Homo sapiens
agagctgttcctattcggccatcttggctcctccagaataaacctattttttgagtattctaccttgtaaatactgttatttgtatatactgtaaatgat

SEQ ID NO: 881275 - DNA, 99 bp, Homo sapiens
ataggcaacacttgctaaggattgggtggtgtaggctttggtttcttctagggctctctgcttatctgctgactcgaaccacctcttccacagactctg

SEQ ID NO: 881276 - DNA, 98 bp, Homo sapiens
tttcatacattgttgatgtttctctacatcataaagaccaaagagtcaggaatgcttggaccatagtcttgagtttacttatgaggtcaattggaaat

SEQ ID NO: 881277 - DNA, 99 bp, Homo sapiens
gggatttagctcagtgatcttgattctcgttgttcgatgcatttctgcttgataaaaaatcttgacttgttcccaggtcttggtggccaaatgcaggac

SEQ ID NO: 881278 - DNA, 99 bp, Homo sapiens
acggcgggaaccccagcattcatggcccccgaggccatttctgattccggccagagcttcagtgggaagatcctgttcatcttcatcgacagcgaccac

SEQ ID NO: 881279 - DNA, 99 bp, Homo sapiens
ttcgtcgtggcaacgttgctggtgacagcaaaaatgacccaccaatggaagcagctggcttcactgctcagtcatatttgatcagaaattggatgaacc

SEQ ID NO: 881280 - DNA, 99 bp, Homo sapiens
acagcctgcatgaccctcacggccagccctggggtgttccccgtcactgttgaaattcgtaaggacaccttgaaggccattctgttggagttagaatgt

SEQ ID NO: 881281 - DNA, 99 bp, Homo sapiens
gtcatggagcttttcaggcccaaggtagagttggctttgtgggacacagctgggcaggaagattatgatcgcctgaggcccctctcctacccagatacc

SEQ ID NO: 881282 - DNA, 99 bp, Homo sapiens
ccctcaggtgactacagatgtgttaacacccagcatgttccggtaggagactttctggatggggaagatttccaggaatactcccccagttgcaagagg

SEQ ID NO: 881283 - DNA, 99 bp, Homo sapiens
ctctcatcaaaacaccagagcgactttcattagaaggagagcgacagcccaagtcaccagatgctgttgatggagtaatgaatggtgaatactaccagg

SEQ ID NO: 881284 - DNA, 99 bp, Homo sapiens
gtagttaacagctgaataagcctggtttcctgctccacggatgacaactttagtagaggctgaatcacaatcttctgaaaatgcagctgcatgtcctgg

SEQ ID NO: 881285 - DNA, 98 bp, Homo sapiens
catggtcatctgtgaggaggaaggggatgatgatgtcattgctttctaatggaatccctatagaaagttggtttatggataaaaatgacaatgaactc

SEQ ID NO: 881286 - DNA, 99 bp, Homo sapiens
cagtcagaaaggatttgccagtggagtagaacagattattcttggagctggaccagtacttgaggcaacagcattattgagaaaagcccttacagaaga

SEQ ID NO: 881287 - DNA, 99 bp, Homo sapiens
acaaagcagcgcccgtctgcttcgggcctctggaatttagcgctcgcccagctagccgcaggttccccttctactttgaactgaagatcgccttcgtga

SEQ ID NO: 881288 - DNA, 99 bp, Homo sapiens
agaagctgcgtgaggcctttgaaaatgatatgctggctgttaacgacatgaagaatgcaaccctctccctgaattctaatgacagtgagccaaaatatt

SEQ ID NO: 881289 - DNA, 99 bp, Homo sapiens
gctggctaatgatgaccatgtggacatgctttcgggccttcaggatcttctccagccagtggatgtctgtttcagctgaaccatccgttcatcttcaag

SEQ ID NO: 881290 - DNA, 99 bp, Homo sapiens
ctgcaatatggcggaggcggaaggggaaagcctggagtcctggctcaattgacgagatgcctgaggctgccgtgaaatcaacagccaacaaataccaag

SEQ ID NO: 881291 - DNA, 99 bp, Homo sapiens
cttagcgatctatattccctttccagaagatgattccaacgccaccaattccaacctggtgcactaggccttccaatgagggggatgagcaacaatacc

SEQ ID NO: 881292 - DNA, 98 bp, Homo sapiens
ggtggcgggcgctgctgaaggagtctcgctgagctcgaggaggtggcgcgatggagggactggaaggtgacctgccgagccattgggattggggccta

SEQ ID NO: 881293 - DNA, 98 bp, Homo sapiens
ctgtgagcggaccgcgagcgctgggcgggtccgcggcgcggtcggtcggcgcctgttctcgggctgtttggcgggccgttaattaaggaaaagttgag

SEQ ID NO: 881294 - DNA, 147 bp, Homo sapiens
gcgtctccagcgagcggcgcggagctggacgccgcgatcgtggggcccgcgaggcgggcagccggggcgtccagactgtgccctgtccacggtgcctcctgcatgtcctgctgccctgagctgtcccgagctaggtgacagcgtacc

SEQ ID NO: 881295 - DNA, 99 bp, Homo sapiens
catggattccaatgcccagtctcacaaaatctttatatttgatgcccggccaagtgttaatgctgttgccaacaagtccacaagccctagccatgccgt

SEQ ID NO: 881296 - DNA, 99 bp, Homo sapiens
agtttgagacaatcaatttgaactctgcatcttcatggtttacagaaattggtgcaggctaagcttagaagcagtcatttgctttaaagaaatgttagc

SEQ ID NO: 881297 - DNA, 125 bp, Homo sapiens
ggacattcctctggttatgatagtcgttctgcacgtgcatttccatatggcaatgagcattggggagtcagcaatgtccgttgtgttaaatcagctgctgcccatgattaagcctgtaacccaga

SEQ ID NO: 881298 - DNA, 99 bp, Homo sapiens
cctgagtcacgctgctcatgccgccgtcttctgctaagccttgctccaaattggccaggatctccatcaagcagctccttgacagtgcggtagtcatca

SEQ ID NO: 881299 - DNA, 99 bp, Homo sapiens
cgtggttctcccacgtgggcccctttaacgagggaggtcaggatgcagcagtctcggccctggctgctctatgcagtgaatattacatgaaggagccgg

SEQ ID NO: 881300 - DNA, 151 bp, Homo sapiens
agggagggtaggtgccacacaacctggaacacgagtacacccatgtgggaaactgcgtgtgatgagcaggacgttctgggaggagtggaaggtcaggttgtaggagggagggtaggtgccacacaacctggaacacgagtacacccatgtg

SEQ ID NO: 881301 - DNA, 75 bp, Homo sapiens
gcccggcaatgccgccatccgggagaagctggcctgggccaagcccgaagaagcagacagagaagacgaggtgga

SEQ ID NO: 881302 - DNA, 99 bp, Homo sapiens
ggtgatttctgcatttccaactgagaaacaccaaggaaggctctggtctaaaccttgccctcactcctgtcttctggctcctgaccaccctggtgtctt

SEQ ID NO: 881303 - DNA, 99 bp, Homo sapiens
agcggcctcggcctccccttggattcagacgccgattcgcccaggctttgatgaactaggtggacttctcaaaccaacagtggcctctcagaaccagaa

SEQ ID NO: 881304 - DNA, 99 bp, Homo sapiens
atgagtcatgtggcagtggaaaatgcgctcgggctggaccagcaggacccagatgatgtggtaccagttggccaaagaagagcctggtgttggtgcatg

SEQ ID NO: 881305 - DNA, 98 bp, Homo sapiens
aagggagaaagtcgtagggaatcgagactggacagacagaggcaacaaaaaccattgagaaccttgtacgtgttggaaacatgccctgaactgtcaca

SEQ ID NO: 881306 - DNA, 99 bp, Homo sapiens
tgttggcagccacttcaaaatcagacctctgtggcagcattttttccagaacacaaaagggctgacagatgaagagattgatatggccttccagcagtc

SEQ ID NO: 881307 - DNA, 99 bp, Homo sapiens
gtcagaatgcagggcctggcctacaatactggagttaaggaaattcttaacttcttccaaggttaccagctgtgctccattgaagtgacttgtgaatca

SEQ ID NO: 881308 - DNA, 98 bp, Homo sapiens
tgaagtatttggctgaggagttttcaatcccagctgaaagtttagaagagaagaatatggctaaaattcatcgtggtcagctggagaagttgaaatca

SEQ ID NO: 881309 - DNA, 99 bp, Homo sapiens
gccgagacatccgctccttgcccgagaacatccagtttgatgtttactacaagagtgttcactggagagaagctctgaatatcttgaagctggtagttt

SEQ ID NO: 881310 - DNA, 99 bp, Homo sapiens
attttgatgtggatgatgccaaagttttattagatgatgatattgatgatgaaatgttttatgatgatcatttggaggcttattttgaacaactggcaa

SEQ ID NO: 881311 - DNA, 99 bp, Homo sapiens
ttacaatcatcctgcttcttgtacatcactgcaccccgagcagaaggcagaccggtattttgtgttatacaaaccgccccctaaagacaacattcccgc

SEQ ID NO: 881312 - DNA, 98 bp, Homo sapiens
atcgttttgagaaccagacaggcttccctccccctgatagcagatttgatgcctactgctttaaacgtacgttgaagatggagaacaactgatgtcaa

SEQ ID NO: 881313 - DNA, 99 bp, Homo sapiens
gaaaaaaaagtttggaagatctttaaatctgacagtgaagtggctggttacatccggcaagcgggtgacttccatcagatggagtcttgctctgttgcc

SEQ ID NO: 881314 - DNA, 99 bp, Homo sapiens
gttgcaggtaacttcttcccaatagtttccacttggagggttgcacatcctttcaggaagtcattgatgttgttgatgcagtcagcttcagtttgggga

SEQ ID NO: 881315 - DNA, 138 bp, Homo sapiens
gtggaaacagcagatgtaccctcagtacgccacctactattacctttttcactagattgtgtgaagatcataaactgacgaactttatccttctgcgatgatttcaacttgttcttggcttgcagatactgggggtaa

SEQ ID NO: 881316 - DNA, 99 bp, Homo sapiens
gtccctcttcagttctctggagccccagattcaacccgtgtacgtgcctgtgcctaaatatctggagtccatctttcaccatcttctcctgagattgta

SEQ ID NO: 881317 - DNA, 99 bp, Homo sapiens
aggcactgagctgtctgtgcgcgagaacactggatctaatgaacggaacatctatattgtggtgggtgtggtgtgcaccttgctggtggccctactgat

SEQ ID NO: 881318 - DNA, 99 bp, Homo sapiens
aaggggcgaagttaatacagaactgtagtgacagtcagctcgaacacagagtttccactcgtgctggaaaacccaccactcctctttccattcttcgaa

SEQ ID NO: 881319 - DNA, 99 bp, Homo sapiens
gaattctgcctaagccaactcgaaaaagccgtacaaaaaataagcaaaagcgtcccaggaggatgggcaacactccagattcagcctcagacaacctcg

SEQ ID NO: 881320 - DNA, 99 bp, Homo sapiens
ttctgagtccattcccgagctattctgttgtacagtacacggtgaggaaggttttagctgttgactgcccatcagggcagtttgaatagcacattggtt

SEQ ID NO: 881321 - DNA, 99 bp, Homo sapiens
ttacagagcaacttgatgaaggtacacccaatagagaggagccagcaccgctctttgaccttgccatgcttgccttagatagtccagagagtggctgga

SEQ ID NO: 881322 - DNA, 99 bp, Homo sapiens
tattgctttggatttgttgtgcaactgttgctacagctgtggagcagtatgttccctctgagacatcaactagtcaggcagtcttccgtctccagtctg

SEQ ID NO: 881323 - DNA, 99 bp, Homo sapiens
gatttcagagtacaaatctgtgatttactaccaagtaaagcagccacgctggtttgagactgttaaggtgaatgaaaactttgccattgatttgatagc

SEQ ID NO: 881324 - DNA, 99 bp, Homo sapiens
gccagctggcagtagcgccctgtaggacccccaggacccgatggggcatggtctagtggcccagtcaggacgcggaaacactccctggaggttctgacc

SEQ ID NO: 881325 - DNA, 98 bp, Homo sapiens
aacggggccctccaccctgcaattggcctgcggccatccttgaggccatgtggtctttgcatgagcacccaggatgctgtgccagcaggagaagctga

SEQ ID NO: 881326 - DNA, 99 bp, Homo sapiens
ggaaagagggcttgcatgaagaggatggatcttctctgcccaacatgttcggcgaccttcggtccacgtttattgccttgatgattgggtcctacgcct

SEQ ID NO: 881327 - DNA, 99 bp, Homo sapiens
gacttccttcctcttctgaacaaaggggacaagggcctgtccgacacgccctacgacagcagcgccagctacgagaaggagaacgaaatgatgaagtcc

SEQ ID NO: 881328 - DNA, 99 bp, Homo sapiens
gcttctttttcaatcatggagaggttactcactataaacaatatccacccaacacaagcaaagtttattcctactttgaatgccgtgaaaagaagacag

SEQ ID NO: 881329 - DNA, 99 bp, Homo sapiens
tgcgaaacgatcctctcaatcaaaataagacagagcgccaagtgtctcgctggtttgttcagtgccttcgggaacagtccatgctgctagaaattattt

SEQ ID NO: 881330 - DNA, 99 bp, Homo sapiens
gtgcctccggatgctagactctggggccgattatctgcacctggacgtaatggacggacaaatgctgtgcttcatgaagttaaaagagaggggctcccc

SEQ ID NO: 881331 - DNA, 98 bp, Homo sapiens
gcctgtgttcacgagggcatatatgaagaaggcatttctattttagaaagcagttcggttggtgttcgaggaagagacattgttgttcttggtgtgga

SEQ ID NO: 881332 - DNA, 99 bp, Homo sapiens
aacgaaagcaagcagcaggagctggaggccgtgcggaaggattgttcaagtttagaagaatacaacattgccgcagcattactccctttgaccagtgct

SEQ ID NO: 881333 - DNA, 99 bp, Homo sapiens
gtagctcagaaatgtggcttgtcttacaagattggcatggtagcttggaaaatgacctttaaaagtcctgaatatccagaaggccgagatatcattgtt

SEQ ID NO: 881334 - DNA, 99 bp, Homo sapiens
ggatgctgatctggactcctccgtgcccgctgacattatctcatccacagacaaacttggtgtgatccctcacatccacaaatctctgattggaaagaa

SEQ ID NO: 881335 - DNA, 99 bp, Homo sapiens
gcctacacatgttcctgcaagaggaggcaattgacaggaactacgtcccggggaaggattgatcggaagatgtcaagtactcacaccagctacaaactg

SEQ ID NO: 881336 - DNA, 99 bp, Homo sapiens
gagacggtggagactctcatggctggggaagttagtgccatggttgaaaagcagcatctgttatagcaaaatacccacacaaaataaagagtggagctg

SEQ ID NO: 881337 - DNA, 98 bp, Homo sapiens
agaaatcctccacctactttacttcatccagaaaaatggtgtgaagaattcaaccactttatttcacaggtgttcttaaaatacaccggaaagaacgg

SEQ ID NO: 881338 - DNA, 98 bp, Homo sapiens
tgatggccgtggtgttttccaccttggtgtgtctcagcaggctctacactgggatgcatacggtcctggggatcatggaagctgataaagatgacaca

SEQ ID NO: 881339 - DNA, 99 bp, Homo sapiens
tgagctttctggacttccagctgggcctgacagagaaggctcactcaaggatcagttggctttagcaattggcttggtggagccagtgaacgtggtgga

SEQ ID NO: 881340 - DNA, 99 bp, Homo sapiens
aaacagaaaggggctcatactcatcttatgggagagaatcaaacttacagggttgccaccaggcttgaaactgttacaatatggctttccttggactct

SEQ ID NO: 881341 - DNA, 99 bp, Homo sapiens
aaacatatctgcccctatagaaccaacaaatatggagagtattatctccttctcttgcctgggtcttatataataaatgatggcttctggaaacttaca

SEQ ID NO: 881342 - DNA, 99 bp, Homo sapiens
catgccttatttaaacaggttcattttggaaaagcctaaatgcgatggccaggtattactgacacaagtgtggaagcgtttaaacctggtagaatgtga

SEQ ID NO: 881343 - DNA, 99 bp, Homo sapiens
ctggttaagcgcaacagcgaactagaaaatcaaatggccaaactaatacagatctgccagcaggttgaggcatttgtaaaggatgttcatgaagattca

SEQ ID NO: 881344 - DNA, 99 bp, Homo sapiens
ggaaaactcctgaggagattcgcaagaccttcaatatcaaaaatgactttactgaagaggaggaagcccagatcacctctgcagcctgcacagccgggc

SEQ ID NO: 881345 - DNA, 98 bp, Homo sapiens
ttgtcttcattccaggtggccagagcgagtggggccgggcgttgtcacggactgaaactgttgaggagcccatggaggaagaagaagcagccaaagaa

SEQ ID NO: 881346 - DNA, 98 bp, Homo sapiens
tggaaaaagactttaaaactccctccaaaggatctaagaatcaaaacttcgtgagacggtttaagcggaagcatcttactgccattgactgccagcat

SEQ ID NO: 881347 - DNA, 99 bp, Homo sapiens
gtgccattatggcgtgtgaagtcaccaccagcagggccttggtgaccctgagggcctcgaatgccagcaggtccaactgtaccaggatgtccagtgcga

SEQ ID NO: 881348 - DNA, 99 bp, Homo sapiens
gtggaacttgttggaaatggaacatacgggcaagtttataagaaacttgtggtggagaatgttgatgtgttaacacaaatgaggaccagctttgacaaa

SEQ ID NO: 881349 - DNA, 99 bp, Homo sapiens
agtatcggcatgatggagcttgcccaacaactaatgttcaagacagagttccttcatattcacaaggagcaagaccaaaagaaaactcaatgagcactt

SEQ ID NO: 881350 - DNA, 99 bp, Homo sapiens
aagctaacaagaatctgattttgaaggctatatctgaagctcaagaatccgtaacaaaaacaactaactactctacagagtctcactctgttgcccagg

SEQ ID NO: 881351 - DNA, 99 bp, Homo sapiens
ttacttcagcaggtggaccagttacagacatatccagttcaatcacatggtggaaactatatgggtcagagcattcaccaagtaactgttgcccaaagc

SEQ ID NO: 881352 - DNA, 99 bp, Homo sapiens
ttgggcccagtttatggcttccagtggaggcattttggggcagaatacagagatatggaatcaggtatcattaatgggattggaaattttaagtgcctt

SEQ ID NO: 881353 - DNA, 99 bp, Homo sapiens
gtctgtagccgcagctgcgggtccgggattcccagccatggcagattcctccgggcagcaggagcctgtcatagggaactgcatggatagaagttctcc

SEQ ID NO: 881354 - DNA, 98 bp, Homo sapiens
accttcaaagaccactccttctttgaaacccgaaccctagcggagattgccaaagtggagctggacaatatgccactccgtggaaagcagctgcgtgt

SEQ ID NO: 881355 - DNA, 98 bp, Homo sapiens
gaaagttcataaatacaacttagcagtcacagacaagttgaagatgaccttggatgaatctggttatagatggacaagagacgatcattctgcaagca

SEQ ID NO: 881356 - DNA, 99 bp, Homo sapiens
ttatggtgggaggagccgatactgagcttcttcctatttgccatgggattttttatcaagcagaaatgcatcgaacaacgagaatcaagatcactgagc

SEQ ID NO: 881357 - DNA, 98 bp, Homo sapiens
tcaatggagctggaaaacatcgtggccaacacggtcttgctgaaagccagggaagactgaaagagcatattccttttgtggaactattgaatacatgg

SEQ ID NO: 881358 - DNA, 99 bp, Homo sapiens
agaggcttcatctctgttgcaggatttagcagtactatactggcaattgctggagaagattttgcaattgttgcttctgatactcgattgagtgaaggg

SEQ ID NO: 881359 - DNA, 99 bp, Homo sapiens
gcggagaggagatgcacacggcactcgagtgtgagctttcactctactcagttcctgagggtcaatcgaagtatgtggaggaggcaaggagccagcttg

SEQ ID NO: 881360 - DNA, 98 bp, Homo sapiens
tcatccgggagagccagaccaggagaggacctgctgcagctacagtatgaaggagttgcagtcatgaaattatttgatagagctaaagtaaatgtcaa

SEQ ID NO: 881361 - DNA, 99 bp, Homo sapiens
catgggaaggaggccgagccgggatctcaggtcctcgggggcggcggccacgccaaggacggatcgtcagtatttaaacagatcacatcatgcgtgagt

SEQ ID NO: 881362 - DNA, 98 bp, Homo sapiens
tcgactccagcgtgctctctcggaataagacagaggacttcagggccacaggtgctgccaagatgctccagggcacctgctccgtgctcctgctctgg

SEQ ID NO: 881363 - DNA, 99 bp, Homo sapiens
tacactcgaagcagtttggaaatattctcatccttagtggggatgttagatctatattggaaggcgtctgacaacctccaccagcaccttttgatgaag

SEQ ID NO: 881364 - DNA, 99 bp, Homo sapiens
acccctcttccgctcctgttttatactgcttccatatttacacaacaggaacaagatcctaccaacctctacatttctaatttgccactctccatggat

SEQ ID NO: 881365 - DNA, 99 bp, Homo sapiens
aaaggctcaacaagaaacaggagaacgggaagcctcctgccgagataaagccaccacgtctgcactacaggcacctctcaagcctcttcagcctttctc

SEQ ID NO: 881366 - DNA, 99 bp, Homo sapiens
tgggagcagttttcatggatgcccctgtttctggtgatcatatctgaagatattagtgagctacaaaagaatcaaactacatctgtagccaaaattgca

SEQ ID NO: 881367 - DNA, 99 bp, Homo sapiens
ttttcttatgctgggatgtgccttagaggattatgggaaaattcacgaattgtgagagtaagagttatagccggaataggccttgccaagaaggatata

SEQ ID NO: 881368 - DNA, 99 bp, Homo sapiens
ccaagttgtcgacgaccgacagggtggtgaaagccactgaggcggctcccagctgcgttggcgacatggccgacacccccagagatgccgggctcaagc

SEQ ID NO: 881369 - DNA, 99 bp, Homo sapiens
ggcccttgtggtctgttctgtagtcagcacaaatctgaagatggtgtcaaagagaaattctggtcattgctttagtgatggatatatttacagatgtgg

SEQ ID NO: 881370 - DNA, 99 bp, Homo sapiens
ctggctgctgtgtcccgcggcttgcgctccgtagtggactccgcgggccttcggcagaaattctccagaatttcagaaacttctgggcatcgctatgga

SEQ ID NO: 881371 - DNA, 98 bp, Homo sapiens
atggctgatcccgagacctgcctcatggtcttcaagaatcactggtcccagtccttcctggggtggatgctctcagcaatatttagtactttcctgcc

SEQ ID NO: 881372 - DNA, 99 bp, Homo sapiens
aaggtcaacaaggacaacaatgagatcgtggacaagatcatgggcaaaggacagatccaggtctcggcgcggaagatggccggcggcgtggacggcccc

SEQ ID NO: 881373 - DNA, 99 bp, Homo sapiens
agacccatctttatgcaaagccagcgttacagtaatgttccagagtgcctggtgaagaatgtgatgggatcactagcatgtctgcggagagcggccctg

SEQ ID NO: 881374 - DNA, 99 bp, Homo sapiens
tatctttgatgcttgctttgaaagtgggaagccgtggcggacggagcagacggaggacctgaagcgagtgcttagggcagtggacagggccatcccact

SEQ ID NO: 881375 - DNA, 99 bp, Homo sapiens
cagaactgttccttcagccaaagaaacaagccgtggaataggtgtatcaagtaatggtgcaaagcctgaatttggcctgtcactgctcctcatcctcct

SEQ ID NO: 881376 - DNA, 99 bp, Homo sapiens
gcagtggaggccctgggagccaaggccagcatggtttaattggttggggtcagataagaagaggagtgacaatcaagccaacagtagatgatgactgaa

SEQ ID NO: 881377 - DNA, 99 bp, Homo sapiens
cgagcggtggcgtcgttgtcgccccctcctcgtcgggaagaatcgtttggtctcctgccgtgcccgggacaagctgtggggggtctgtgtctccatcct

SEQ ID NO: 881378 - DNA, 99 bp, Homo sapiens
ctccctgcgactcctggaccaccgggcgctggtctgctcccagccggatgggaaggccattgtgactatgtggtgattacagttgtcttactactgagt

SEQ ID NO: 881379 - DNA, 75 bp, Homo sapiens
acagctcgcagggaagatgaaagttacgggatgatgatgctgaagctatccttgctgcagacttcgaaattggtc

SEQ ID NO: 881380 - DNA, 99 bp, Homo sapiens
ttcctgattggcattaatgaagagtcagtggaaggcacggcaatctatttaccagtgaagctgtggtctaccaatctagacaactcagtggcaagcatt

SEQ ID NO: 881381 - DNA, 123 bp, Homo sapiens
cagcagctggcagaagaagcaacacgcaaacgagagctgaggctaatgaaaaacagggagaaaactggttgtcctggatgtttgaaaagttggtcgttgtcatggtgtgttacttcatcctat

SEQ ID NO: 881382 - DNA, 99 bp, Homo sapiens
ggagattagcaggaacagcctccttcactgactggttgctcctgaggcttttccagttttatgtcaatcactaaaggatgatttacaggtcagtatcaa

SEQ ID NO: 881383 - DNA, 99 bp, Homo sapiens
gagctgaccaagatgctatgtgagatcttgaaagtgggcgagttgcaaatctccaacctgctggtggctactaagaaagcccaggagtggcagcccgtc

SEQ ID NO: 881384 - DNA, 99 bp, Homo sapiens
cggcccccttaaagggacagggactgctgcaacctacggggtgtacttgggaacgaggggtgaagcggcccaggttaacacagaaatctgcctcctggg

SEQ ID NO: 881385 - DNA, 98 bp, Homo sapiens
ctgcgagctcctcaagaatctcgtgctcaccggtttctcccacatcgacctggcaattaagttggaatatgcaaggttggttaagttggcccaagaag

SEQ ID NO: 881386 - DNA, 99 bp, Homo sapiens
ggacctgcaggaggacgcagacggattttgaaaaagtaccagaaggtcctatccctccatctacaccaaagtttgcatatggaaaggtcactttggaaa

SEQ ID NO: 881387 - DNA, 99 bp, Homo sapiens
ggaggtgaggccgaggtgactgcagagcggctcgcgagagactttagaagacagctttccatcgacactaggccctttagaccagcctctgaagggaat

SEQ ID NO: 881388 - DNA, 99 bp, Homo sapiens
cctttagagtcagatgtcttcattgaagatagagccgaaatgactgtgtttgtacgagcctgtggggcccggatagtcagccgaccagaggaactgaga

SEQ ID NO: 881389 - DNA, 99 bp, Homo sapiens
tgtgtgctagagaaggctgggcctgaggagttggaggccttccggagcagtactacagcctcacctggttcctgagccccatccttggcctcatcttca

SEQ ID NO: 881390 - DNA, 99 bp, Homo sapiens
gccgacatcgcggccttcttccgatccggcccgcaagtacatcgtggactccatgggagaaaaatatgccgaaggtgttattttagacttggagaagac

SEQ ID NO: 881391 - DNA, 99 bp, Homo sapiens
gaggacgaagacgaccctgacaagcgcatctcgagctgagaacacaatcacctattcacttctcatgcacccggatgctctggaagagcctgatgacca

SEQ ID NO: 881392 - DNA, 99 bp, Homo sapiens
ggataccttcttaggtggggaagactttgaccaggccttgctacggcacattgtgaaggagttcaagagagagaagtggtccaaaggcaaagttcggga

SEQ ID NO: 881393 - DNA, 99 bp, Homo sapiens
gacagggaaactgacgagttcttcaagaaatgcagagtgatcccatctcaggagcacctgaatggtggggaccaatgccatggacagccccctcctcaa

SEQ ID NO: 881394 - DNA, 99 bp, Homo sapiens
tgcaaccaagcacctgaaacagcagatttccacaagacggcaccctatgtcgtcactggcagcgtagatcaaacagtaaaagtgtgggagtgccgttga

SEQ ID NO: 881395 - DNA, 99 bp, Homo sapiens
ccaaaattgtctcaacctcttgatctcatgatccaccgcctcaccctcccaaagtgctgggattacaggcatgaggattgacttctaaagactcttggt

SEQ ID NO: 881396 - DNA, 99 bp, Homo sapiens
aaaacatgtactacagccagtcttctatgtttccacatcggtcagaaaaagatttacagaatgtctgaaggggacagtgtgggagaatccgtccatggg

SEQ ID NO: 881397 - DNA, 99 bp, Homo sapiens
actgtatactacagcactctaaccgatgatccagatcctgatgatggatttaactataaacagatgatggttagagatgagcggaggtttaaaatggca

SEQ ID NO: 881398 - DNA, 99 bp, Homo sapiens
atggaattgctaagaaaagtagtagtccctgggatccgtatgtccattaaacttcatcaggcgaatctttctgcattgaatttgaagatttctgaacag

SEQ ID NO: 881399 - DNA, 99 bp, Homo sapiens
tcacttccttccttactttgtcttggtatactacatggcaaaatgggaaaggaccttgtaaagtcaaaaatgtcagaaacttccaggaccgcctttgga

SEQ ID NO: 881400 - DNA, 98 bp, Homo sapiens
ttgaatgactggaaactgattggaaactctttgggaaagccactcgaaaagctctttcagtctcacatggcaacgaaaacaacttgtatgtcttcaca

SEQ ID NO: 881401 - DNA, 99 bp, Homo sapiens
taaagtatatgtatgacttttaaaagagagagcttgtgaaactgagggaataggacctgaaggagaagaaggagaaggtggaggagaaggcaagccgga

SEQ ID NO: 881402 - DNA, 99 bp, Homo sapiens
cgtagtcatcgcggatttgcaccccgtggggtggtgcacacagaacaacaaggtgttgatgccgccggacgcaatcatttggggaagaatctacagttg

SEQ ID NO: 881403 - DNA, 99 bp, Homo sapiens
gcgaaggccgggacccggttccccggcccacagtgggggtgtgcaaacccgagagaactgggtccttccatagtgacgccccccaaggacatctggaat

SEQ ID NO: 881404 - DNA, 99 bp, Homo sapiens
ccgcagaaagtgcctgtgcatcaggtggaaaggagactatggaaccaggatccagcagtacttcccatccaactacgtcgaggacatctcaactgcaga

SEQ ID NO: 881405 - DNA, 98 bp, Homo sapiens
ataccaggggcagagggaccactctgacagtcagattgttcgatatggtgagattccagctgaattaagggcggcggccactgaccaccggcaggagc

SEQ ID NO: 881406 - DNA, 99 bp, Homo sapiens
gttagacagtgaatgtggaaaggagattgacagtcacaattttgtaataaggaattacatgaacgacagccttcgcaccgacgtcttcgtgcggttcca

SEQ ID NO: 881407 - DNA, 99 bp, Homo sapiens
caggcttcgggcccgggaatcgccgccgccgccgccgcagagctgcagctcggggccgaggccagagtcctggtggaggacgatgagatcatgcaggga

SEQ ID NO: 881408 - DNA, 99 bp, Homo sapiens
ttctgttccgcacaggcctgctgaactgggtgctttatatagggttgctataaaatccattcgtaaggacaaaattaaggatgaacaagacatggttca

SEQ ID NO: 881409 - DNA, 99 bp, Homo sapiens
cttgacctttctgttgatgtggagcagaatacatccattacccactgtctaaggatgaagtgacacccccagctacatccgaggaggttctaggacctg

SEQ ID NO: 881410 - DNA, 99 bp, Homo sapiens
ctgcaaattaattcatcattagagaaattagatctgggtgactgtgatctggcctactgaacttgacgcactggtatttggccatctatacaccattct

SEQ ID NO: 881411 - DNA, 99 bp, Homo sapiens
cgggatcgctttctcccatcgaaccttctagttgcttattgcaggctcttgatggaaatgtgtatgatcatctcaaggattatttaatagccttcagcc

SEQ ID NO: 881412 - DNA, 98 bp, Homo sapiens
gtgggtccgcgctgcttccacccaacttcctgttagggaaatctgcttcgccactgaaggtactctgcaccccagaaggaatacgacttcagtgtttc

SEQ ID NO: 881413 - DNA, 99 bp, Homo sapiens
ctacatctgcaaaaccaccattggggacagggaggtggattctgatgcctactatgtctacagactccagggtaaaacatggatattccaagagagtct

SEQ ID NO: 881414 - DNA, 99 bp, Homo sapiens
cgtcattgttgttcgtagggaggtcgggtgggcccaagtaggacagtagctcatcagggttggtcagttccgggagcagttttgttaaatagtccacca

SEQ ID NO: 881415 - DNA, 99 bp, Homo sapiens
ttttgctcattaacagaaaagaagaggagaatgctaagcagagtctggccagcatgacccagaacttagagccacttctgaagaagcagggctgggact

SEQ ID NO: 881416 - DNA, 99 bp, Homo sapiens
tccaccaaaacccaacagaccaccaaatgttgacctgacgaaattccacaaaacctcttctggaaacaaccaaagagagtctacagtatgcattagaaa

SEQ ID NO: 881417 - DNA, 99 bp, Homo sapiens
caccgtttaaagggagcgtatttttttcttttccacgaagaggactctttgtttcatgctcaattcgaggtgacaagtacagcttggggtacacctggg

SEQ ID NO: 881418 - DNA, 99 bp, Homo sapiens
gcaccatgacgtccatccatttcgtggttcacccgctgccgggcaccgaggaccagctcaatgacagatgggccatcaactgagaaagaccttgacgaa

SEQ ID NO: 881419 - DNA, 99 bp, Homo sapiens
cattggatgatatgtctgaaatgatttgagagggaagatctgatctcctagaattagagttggtacagaaaccatttcagctccaaaaatgttggagga

SEQ ID NO: 881420 - DNA, 98 bp, Homo sapiens
gaagatgaagaaacccagcttgatatgttgctcatgccttcaaaccaacagcataaaacagatgagaaaggcagggctaatttgggagtattcagtgt

SEQ ID NO: 881421 - DNA, 99 bp, Homo sapiens
cccgcgccccgcgggacccggacggcgacgacgggggaatgtggcgctggatccggcagcagctgaacaagttgaaatcatcgcagaaggataaagttc

SEQ ID NO: 881422 - DNA, 99 bp, Homo sapiens
ggaaaaatcgagcagaaagaatgtctttcagtcagccataatggcaggtgaagaaattaatgaagactatccagtagaaattcacgagtatttgtcagc

SEQ ID NO: 881423 - DNA, 99 bp, Homo sapiens
gaagactatccctctatacaatgtactccaaagattcaggtttactcacgtcatccagcagagaatggaaagtcaaatttcctgaattgctatgtgtct

SEQ ID NO: 881424 - DNA, 99 bp, Homo sapiens
cagcagaaaataaggcagagtctgaagaaatggagagctggctttatgtgctggggcagaagagatccgatagctatgttctgctggagcattctgtga

SEQ ID NO: 881425 - DNA, 99 bp, Homo sapiens
ttcagagagctgactgcctggttccaagcacccttacccttctgaagaacagaaaaagcagttggcacaagacacgggactcaccatccttcaagtgaa

SEQ ID NO: 881426 - DNA, 98 bp, Homo sapiens
aaagatgagctcagctttgaacagttccatctcttctataaaaaacttatgtttgaacagcaaaaatcgtcctgtgcctcctgattgctgagtgttca

SEQ ID NO: 881427 - DNA, 98 bp, Homo sapiens
tcgaagtctcggtcccgaagccgatctctctctcgttcaaggaagcgcaggctgagaaatgctccacctgtaagaacagaaaatcgtcttatagttga

SEQ ID NO: 881428 - DNA, 99 bp, Homo sapiens
gctggggccaggacccagacagagacacacggtcactgcagctgaagccgctgcccctgctacaggtactccaaagattcaggtttactcacgtcatcc

SEQ ID NO: 881429 - DNA, 99 bp, Homo sapiens
cagttctcccggtgtggccacgagtcgggacatggatttgattgacatactttggaggcaagatatagatcttggagtaagtcgagaagtatttgactt

SEQ ID NO: 881430 - DNA, 99 bp, Homo sapiens
aaggatgaacattctgccgaagagaacaagacgtgtgaagactcaggccttggacaagattcgctatgagagcctgacagacccttcgaagttggacag

SEQ ID NO: 881431 - DNA, 99 bp, Homo sapiens
aagaagtactttgccaaacaccctcgacttggttacctgcctgtccagacagttcttgaaggtgacaacttagagactgtctcaggatgatacataccg

SEQ ID NO: 881432 - DNA, 99 bp, Homo sapiens
agcaggaaagccagtgttgtggaccctagcacagaggagctcttggagtccaggctgagggtcttgaagaaggaactggaggactgtgaggtgttccgg

SEQ ID NO: 881433 - DNA, 99 bp, Homo sapiens
tgaaagggaaaacccccattcattctggattggtggatctgaagtacaaaatattttccagctgtgttccagatcatctccctggtaatttaccccgtg

SEQ ID NO: 881434 - DNA, 99 bp, Homo sapiens
cacacggtgaacagcccatccctggtctcatcaattattcccatcattcaacagatgaacggtaccctcttatatatggactgattcttattccctgct

SEQ ID NO: 881435 - DNA, 99 bp, Homo sapiens
gcaaggaagaaattgttcagttcttctcaggtcgctcatcccgtcagtcatcctttattgcagtcgggatccttggggttgttctgttggccattttcg

SEQ ID NO: 881436 - DNA, 99 bp, Homo sapiens
ttggaggtggagcaggccctgactccagcatggagatatggaccaaaaggaacgagacgtgattatgagggagtttcgttctggctctagcagagtttt

SEQ ID NO: 881437 - DNA, 99 bp, Homo sapiens
ggggatatagaccacgattccgcagccactacatctgcagctacaacaggcttcagtttaggattcaataaacctgcagcatctgccacaccatttgct

SEQ ID NO: 881438 - DNA, 99 bp, Homo sapiens
gtggagtgttctgcacttacacagcaggggaaggctagcctaatcagggatatgtccagttcagaaatgtggaccgttttgtggcaccgcttctccatg

SEQ ID NO: 881439 - DNA, 99 bp, Homo sapiens
tggaggcgacggcggctgcggcggcggcgggaccccgcaaatctgtccaaggctgcctggggagcattggagaagaatggcacccagctgatgatccgc

SEQ ID NO: 881440 - DNA, 99 bp, Homo sapiens
gatgaactggcgggtgtggacgccactacagttcatcaacatcaactacgtccctctgaagacaggggcaagtgtccgagtggtgaatcagctacttac

SEQ ID NO: 881441 - DNA, 99 bp, Homo sapiens
ctcggccccatggacgccctgtgcggttccggggagctcggctccaagttctgggtgaaagaactcttttcttctttgggagtcgaatgtaatgtcttg

SEQ ID NO: 881442 - DNA, 101 bp, Homo sapiens
ctcttgagtagctgggattacaggcacacaagtctctgaattttgtctcaacactgctccagattactatgtcggaacagctggatttacctgtgagacag

SEQ ID NO: 881443 - DNA, 99 bp, Homo sapiens
acggcatctccctggcttctcgtctgaacccgccccaggtattatagctgcaaatgtccttgtattctgtttatggagagtaccttctctgcagcggac

SEQ ID NO: 881444 - DNA, 99 bp, Homo sapiens
aataaaggcacttggtcctcttgtcaagggttgagacactctgattcttttatccatcttctggagggatgttatcctcatcgagagaaagcaggttcc

SEQ ID NO: 881445 - DNA, 99 bp, Homo sapiens
gtcagccgatgcaccgagtccagcccaggaaaatggagagatgcttgctctgtcaaggcacagcctattgtctcctttgctcagtgtgacatcattcag

SEQ ID NO: 881446 - DNA, 98 bp, Homo sapiens
tggaatgatgccgcagatgatgccccctatgggagggccaccaatgggacaaaacctaaaggcagacccagaagagctttttacaaaactagagaaaa

SEQ ID NO: 881447 - DNA, 98 bp, Homo sapiens
tttgatactgacctgtaaatcatcctttaggaccggccagccttgcagctgtatgatccaggagctcgcttccgagcgcgagagtgtggcggaaacag

SEQ ID NO: 881448 - DNA, 99 bp, Homo sapiens
cccagatcgacgtcccctcgttcccactttggggatcggcgctctggctgtttcgtgaaggagagagaggtttggcttgagcaacaagtttgatactga

SEQ ID NO: 881449 - DNA, 99 bp, Homo sapiens
gctgctgctgcatgtctaccaggagaggagggaactgcggagcgggatgcatcatctgcagacatcagaaaagcatatcgtaagctttcactaacttta

SEQ ID NO: 881450 - DNA, 99 bp, Homo sapiens
ccgagaccgtgaccgagagcgtgaccgagagcgcgaatatcgtcatcgttagaagatgtatccagttaaagcaggcaatagatgaaaataaaaatgctc

SEQ ID NO: 881451 - DNA, 98 bp, Homo sapiens
aacgtgtggcggctcgcgacccccggcaacccggagaaggtctacagagcggcctgcgccagcgaaaccagacagcagccttgggtgcaggcgtggtc

SEQ ID NO: 881452 - DNA, 98 bp, Homo sapiens
tctgccggacatggtggtgtcccacctttttgggaagcccggcaccttttttgctccctgatggactggttcgcttggttaataaacagataaactgg

SEQ ID NO: 881453 - DNA, 99 bp, Homo sapiens
gtcactccccggcggcagcacgaaagtaccatggaagaaatgatttcccttggggatggagacatcaggaccatgtgcccccttctgtctatgaaacct

SEQ ID NO: 881454 - DNA, 98 bp, Homo sapiens
ttagcgggtgggggaagctggtaggcacgggcggctccgcagtgaccggactcgggggagggaccctccattttccatatccaggaaaatgtgatgcg

SEQ ID NO: 881455 - DNA, 99 bp, Homo sapiens
caagacttcagtgatgagaatcgcacctaccaggcttccagcccggatgaggtgtatgcaacagcgttattgcaacaggctaacgaaaacagacaaaat

SEQ ID NO: 881456 - DNA, 98 bp, Homo sapiens
gatcattgtgaagcagctggaggaagacctgtatgacggccaggtgctgcagaagctcttgggaatgggtaccacagaccatgtcatcgtcctggcgt

SEQ ID NO: 881457 - DNA, 99 bp, Homo sapiens
tttcttcgtcttatctttgggaccctagttcaaagataatgcaccccggaccatatttattataagtatgtataaagatagccagcctagaggtatggc

SEQ ID NO: 881458 - DNA, 99 bp, Homo sapiens
ggaagtggatggcgtggagatatggcgcaactgcggcgctgaaggagaacgacctgctcagaatgagaagaggaaggagaaaaacataaaaagaggagg

SEQ ID NO: 881459 - DNA, 98 bp, Homo sapiens
atacaagatattattcttagatccggattcaccattgttcaggctctacagagtgaaggtttaaatccaaggtcatggcaaaacatctgaagttcatc

SEQ ID NO: 881460 - DNA, 99 bp, Homo sapiens
tccctgccctggaactggtggagcccattaaggtggtgaagcagtattttccaatttgaagattcatttgaaggtggctcctgccacctgctaatagca

SEQ ID NO: 881461 - DNA, 99 bp, Homo sapiens
cgagctgagaacctttccgttcctgtcattggaggtcttacttatccgagcccagacattgtataagaagtttgtgaagtcaactggctttctggggag

SEQ ID NO: 881462 - DNA, 99 bp, Homo sapiens
acggtttcgtccgcatcgaggacttcatccagtttgctacggtctacggggcagagcagcgcatggatttaggagaatgtaccaaaatccacgacttgg

SEQ ID NO: 881463 - DNA, 99 bp, Homo sapiens
aagctgcgatccattggagacagcgttgtaagttctacaaatggagagttaaacacagatgaccccaccgcaggacgttcaaatgcacccatcacagcc

SEQ ID NO: 881464 - DNA, 99 bp, Homo sapiens
ccattcagatgggatctttccggatcaatccagatggcagccagtcagtggtggagaatgatctttgctgagtgttcccccaacacttgcccatgtggc

SEQ ID NO: 881465 - DNA, 99 bp, Homo sapiens
aggacaacgagaagaaccggaagctctttgaccttctggatgtccttgagttcaaccagttaagtgggcagaccaacatccacctcagcaaaaacttct

SEQ ID NO: 881466 - DNA, 99 bp, Homo sapiens
gcctggttcagcaggtggccctaaggttggagactctcagcgttctcatctctcttccttcaccatgaagctgatggacaaattccactcacccaaaat

SEQ ID NO: 881467 - DNA, 99 bp, Homo sapiens
cccaaagacaggccagatctacgagctagagttgccatttcgctgggatttttgggtggtgcaaagaggacgattatttatcatttctactaaagcagg

SEQ ID NO: 881468 - DNA, 98 bp, Homo sapiens
caaagcctgccgggagctagaactcaaggtgcccctggtggtccggcttgaagatgacttcctgaagccacagatcatcacccagccagaaaccacca

SEQ ID NO: 881469 - DNA, 98 bp, Homo sapiens
ggatggtgccacaggaggctgtgcgggccccgctccgcttcgaatggactatcttgctaatcatggccggttaaatgagtctgaagccaggcgaaaat

SEQ ID NO: 881470 - DNA, 99 bp, Homo sapiens
aaaggatctgaacaaagtctgctcaaatctcctgctgtgaaccagcagaatttttgaacagctcagaattctgcaaatgcagattttgcaaactttgat

SEQ ID NO: 881471 - DNA, 99 bp, Homo sapiens
tgccttcatcctcaccctcccacacttcctctccgagccctaccagtacaccttggccagcactggtttggaaagaaatcccggcctgcaatgtatgat

SEQ ID NO: 881472 - DNA, 98 bp, Homo sapiens
aggagtccttcagctactgaacactcaaagctgaggagctgtgatgcagatccatccgccctagcaaaatatgttctggctttggtaaagaaagacaa

SEQ ID NO: 881473 - DNA, 99 bp, Homo sapiens
cacagactggatctgggaaaacattgtctaggttggaaagaaccatgactgtattcaggaaggcacatgaactgaagcttctgtcagaatgccaataca

SEQ ID NO: 881474 - DNA, 99 bp, Homo sapiens
gtttgctgctagagggcgcttggggctcctggccccggctctgggaagcttctttttggttccgaagctgctgctcacacagcagcgtgctcagggcct

SEQ ID NO: 881475 - DNA, 99 bp, Homo sapiens
acctccgaaacccctcggcggcgttcttctgtgtggcccgcctgcagccttctttgaatcctggggggagccagtcatctgatgtggtgcttttgaacc

SEQ ID NO: 881476 - DNA, 99 bp, Homo sapiens
cctgtgatgtcgagaacactggcgtggggtagagcagcggctgccatgctcttctgtggcttcatcatcctggtgatctgtttcatcctctccttcttc

SEQ ID NO: 881477 - DNA, 99 bp, Homo sapiens
ttcacctcggcaacaattacttacctggcccaggaggatgggcccgttgtgatctgtgaagtcctggaacgctcccactctccacccctgaagctgacc

SEQ ID NO: 881478 - DNA, 99 bp, Homo sapiens
acgtggctgtttctagcaacgtgctgttcctgctggttctcagaggcactgtgactgacttccctggatttgatgagcgggctgatgcagaaactcttc

SEQ ID NO: 881479 - DNA, 99 bp, Homo sapiens
gtgactacgacttgagtctcccttttccggtgtgtgagtcctgtcccctttacaagaagctccgcctgtcgacaggccctcgggaccaaggatcacgtc

SEQ ID NO: 881480 - DNA, 99 bp, Homo sapiens
tcaacaacttctctgtggcgcgaaagaccacagcaagattctttcattcgtctcctcctagcctgggggaccaggctcgaactgaccctggacatcaaa

SEQ ID NO: 881481 - DNA, 99 bp, Homo sapiens
cctatgtacaaggcactgcatttgcagtaataacctgatcaactctgtccatctggacaccaaacttgcctccgaagccacggaccgagtccacctgcg

SEQ ID NO: 881482 - DNA, 98 bp, Homo sapiens
gattcaaatttttcctgttgattctgccattgacactatatctccattgaatcagaaggtaggcacaacttacgtaacagataagagtgaagaagata

SEQ ID NO: 881483 - DNA, 99 bp, Homo sapiens
ttttgaaccattctacatcccagacaaatggaagtgttatgatgcccttcgaaaaatgatcaactattgaccatatagagtctcactctgtcacccagg

SEQ ID NO: 881484 - DNA, 98 bp, Homo sapiens
aaagatggggttgtcctctttaagaagatcctgaacccgccgccctccccggccacggacccctccctgtacaacatggacatgttctactcttcaaa

SEQ ID NO: 881485 - DNA, 99 bp, Homo sapiens
gattgaaatgatattttccaaaagcccagagcaacagctttcagcaacacagaaattcaggaagctgctttcaaaagagatcccaggcccacaaatcaa

SEQ ID NO: 881486 - DNA, 98 bp, Homo sapiens
accaccaccgccgctgccccggctgcctcctccctgagctttcagtggacacgctacagtttctgctcttcttatacattcaacagttgaacaaggtc

SEQ ID NO: 881487 - DNA, 103 bp, Homo sapiens
cacagctttcaaacagcttctccataagatccaaattattgcttttagcagcattctgaaagcttctctcatttgggagtaggagctcgtgtccggcaactgc

SEQ ID NO: 881488 - DNA, 99 bp, Homo sapiens
ggttgcagtatgtggccagttatttgcctcagtaaaagagtgaaaggtgtagcagtcactcggcctacacccacagcatcgaccttgtgaacccagcga

SEQ ID NO: 881489 - DNA, 99 bp, Homo sapiens
gaatttgaccatcttggtgagaaacattaagacctactaccaggtcatgcaagacaagataatctgccttccgaaaagagtgcagcctgctcagaacca

SEQ ID NO: 881490 - DNA, 99 bp, Homo sapiens
ggagaaggctctgaaagaatacatcaagattctgaatctggtgatgaacttagcagcagctccactgaacagataaggttatatgtggtcatttgagaa

SEQ ID NO: 881491 - DNA, 99 bp, Homo sapiens
cttttaatatctgatactcagcctgaagatactgtggatggtagggaagaaaagtctgcttctgattcttctggaaaacagtctactcaggttatggca

SEQ ID NO: 881492 - DNA, 99 bp, Homo sapiens
gaccaatggacagcagaacagatacagggaaagagtgttataagtgggggtttggatgccttagaattcattggaaaaaagacaatggatgtgatagca

SEQ ID NO: 881493 - DNA, 99 bp, Homo sapiens
acggccctgctggagaaatacacaccttctaacaagcatggttttagctgatatttgaatggtggtacttccataagcatggcacatcttttattgagc

SEQ ID NO: 881494 - DNA, 98 bp, Homo sapiens
ccgtggaggcttcgccgcctaggaagccagttgagggaagttctccatgaatgtacgtcacaatgatgatgaccgaccaaatccctctggaactgcca

SEQ ID NO: 881495 - DNA, 98 bp, Homo sapiens
tagtttagcagctgcggttcaaatcttggcagcagtgaggatgccagagttcatgggtttctagaagacaagttttcaactgcagatacaaacatcag

SEQ ID NO: 881496 - DNA, 99 bp, Homo sapiens
agtgcctccgacgcctcctgatgacctcctgccccccgaggtctgcagtctcctgaacccagcagccatctacgccaacaacgagatcagcctgcgtga

SEQ ID NO: 881497 - DNA, 99 bp, Homo sapiens
atccgcatcaacaagatgttgtcctgtgctggggctgacagatcctgtgttgccataagcccttggcccacatttaagtgggaatgcagctagcttgga

SEQ ID NO: 881498 - DNA, 99 bp, Homo sapiens
ctgcgtcccgccaccggccgcttctgtcctcgttcccaggtgatgctaatgctgctggcccatggaacacaatctgagtagcaaaagtatagatcactg

SEQ ID NO: 881499 - DNA, 99 bp, Homo sapiens
gcactttttggatcggcatctagtctttccgcttcttgaatttctctctgtaaaggaggaatcaaagatcaactcccactgaggacaaatggacctgta

SEQ ID NO: 881500 - DNA, 99 bp, Homo sapiens
ccaaaatacacagatttcctttccaaaatcccattcgaacagcgtgtgagggatgtacaaaggaatggagatcacacctttcctatagtttcaggtatt

SEQ ID NO: 881501 - DNA, 104 bp, Homo sapiens
ggtcgagcagctgaacgagtgtaagcagctgaacgagaaccaagtgcggacgctgtgcgagaagattttgcctgcctgagctcctctagtagtggccacaattg

SEQ ID NO: 881502 - DNA, 99 bp, Homo sapiens
ggcaaatacagccccactgtgcagacccggagctgaactttgacctggaccggggcgtgtttccagtagtcatccaggctgtggtggacgaaggagatg

SEQ ID NO: 881503 - DNA, 99 bp, Homo sapiens
atggcgcagcatgactttgctccagcctggcttaatttccctactccaccatcatcaacaaagggatatctgtgtttgccttacatggcattgcagcag

SEQ ID NO: 881504 - DNA, 99 bp, Homo sapiens
ctacgggcctgatcaaacttgccttcctgttctccaagaccaggtggccaaggtggaatacgtcaggaagaagccaaaattaaaagaagtccaggtgag

SEQ ID NO: 881505 - DNA, 98 bp, Homo sapiens
tttctctgccttgctgatctgagctcagacctgccaatttaccagagataattgataacaccctgtaacagctgagtctcagctgagtctgctctgat

SEQ ID NO: 881506 - DNA, 99 bp, Homo sapiens
catccccatggctgatgcagcaggcatcatccgctatgcaattgggactctgatgccagtatggactggagatgatgggagccagttggatagccccat

SEQ ID NO: 881507 - DNA, 99 bp, Homo sapiens
catgcatcctgccgtcttcctatccttacccgacctcagatgctcccttctgctcctgctcagagtcaagatctccactgaagttggcatcacaaatgt

SEQ ID NO: 881508 - DNA, 99 bp, Homo sapiens
gttgagtttcaaatctgaaaatttctgtctttcaaggtcagcatcgcccacaaaccggccgttctgacttccaatctgagagccagtatataggaaacg

SEQ ID NO: 881509 - DNA, 99 bp, Homo sapiens
agtcagatgcagtgcccccacctgtaattacttggctcagaaatggagaacggttacaggaagaaaaaatgctgggcatcttggtgcagcacaaagtcc

SEQ ID NO: 881510 - DNA, 99 bp, Homo sapiens
tggacatggaatcgagggcagaagatctgggtttgagtccagcagtgctttagcaaaagctggcaggctgacagaggcggcctcaggacggaccttctg

SEQ ID NO: 881511 - DNA, 99 bp, Homo sapiens
ctgtacgcctagaacagtgccctctgcagctgaataacccttttaacgagtattccaaatttgatggcaagatcagcaaagacccgatttttgtaccag

SEQ ID NO: 881512 - DNA, 99 bp, Homo sapiens
atagatgccattgaacagcacaaggtgttactgcggaaatgcaaaacttagtccatcggcggatttatccatttttactgatggtcgtggtattgatgg

SEQ ID NO: 881513 - DNA, 130 bp, Homo sapiens
ctgggtctcctctgtgagctgagcaatgatggacgggtggacattcccctcaggagcaccttctgctccatcattgctcagctcacagaggagacccagccgctatttgagaccacgctcaagtcccggt

SEQ ID NO: 881514 - DNA, 98 bp, Homo sapiens
ccaaagcccttggcttttgctccataccagtcaggtatggaacccttcagatcaaagcttaccaataaattcagtatgtagaacagattaacgtagtt

SEQ ID NO: 881515 - DNA, 99 bp, Homo sapiens
accgggcgagcagagtaagaagcagaggcggggtttcaccatgttgcccagactggtcttgaactcctgagcttaagcaatccacctgcctcggcctcc

SEQ ID NO: 881516 - DNA, 99 bp, Homo sapiens
ggaaaatccaaccactccaacaaccccaacgtttcaaaaatgtcagttataaattcagggtttgtaaagctgaggttggttaaatgaccttcaagttga

SEQ ID NO: 881517 - DNA, 98 bp, Homo sapiens
cgccgaagaagcatcgttaaagtctctcttcaccctgccgtcatgtctaagtcagagagcagtatagctgtgactatggatctggcagattctttatc

SEQ ID NO: 881518 - DNA, 99 bp, Homo sapiens
tcccctattggaagaagctgcagccaagaagaacgcattgagttctacgaactcgataaatttgacaacttaaatgctgcgcatgaaacctctaagttg

SEQ ID NO: 881519 - DNA, 99 bp, Homo sapiens
agaacgtgaggaagaaccgctacaaagacgtgctgccttgccatttcataattctgaatcatgtctgataacggagaactggaagataagcctccagca

SEQ ID NO: 881520 - DNA, 99 bp, Homo sapiens
gcttcaaaaggggggacatcctcaagggtatatttcagaaatcgctgggtaaagactgtccacccagttgtgcatcagtactgtttgatctcaagcgca

SEQ ID NO: 881521 - DNA, 99 bp, Homo sapiens
gtacttgcaagaaacctcaggacttgagtaacagcaacatgccatcatcgtctacagactgccgtggacctggaaatgcagcaagctcctgatgaaatc

SEQ ID NO: 881522 - DNA, 99 bp, Homo sapiens
catcttggtgagaaacattaagacctactaccagggtggcaatgaccatgagatcttcacagaccccagaaccatgggctactccgtgacagcgcctga

SEQ ID NO: 881523 - DNA, 98 bp, Homo sapiens
tctgaaacagtcgcgtaagggagctggtggagttgagatctataatggagatcgtaaaataaaggtttccaacaccctggaaagccggctggatctca

SEQ ID NO: 881524 - DNA, 98 bp, Homo sapiens
tgaccttcatcacagacaacagcctggtggcagcggcgcgggcggtgatgaactttgtggttcgctaccggccagacgagcagccgtctctgcggcca

SEQ ID NO: 881525 - DNA, 99 bp, Homo sapiens
agattctgctcacggaactgcagcactaagtcaggagattggaaaagcaaatgcttttacacaacagacacagagtgtgacctcaccgacgagattgtg

SEQ ID NO: 881526 - DNA, 99 bp, Homo sapiens
caccaccagctgctaccagacccagctcagtgactggcacacaggtctcacggactgctgcaacgacatgcctgtctgcctcccaaagtgctgggatta

SEQ ID NO: 881527 - DNA, 99 bp, Homo sapiens
ctcctgagtagctgggatcacagtgaacagagtatctgtcaggcaagagctgctgtgatggtttatgatgatgccaataagaagtgggtgccagctggt

SEQ ID NO: 881528 - DNA, 98 bp, Homo sapiens
cctgcagcgggttcagctgcatattgccatgtttcaggtgaagagtgttgagctcagcccccatacagattatcaactcaaggctgttgtgcaaatgg

SEQ ID NO: 881529 - DNA, 99 bp, Homo sapiens
gcgttccgcgggatcttgcagaggagagaagaacatgtgatcatccaggccgagttctatctgaatcctgaccaatcaggcgagtttatgtttgacttt

SEQ ID NO: 881530 - DNA, 99 bp, Homo sapiens
caccatcaccttctcccaccccgcaggactgtcctaccgctacgtggcagagggccagcatggggtcctgtcccagcaattcgtggagctcatcaacaa

SEQ ID NO: 881531 - DNA, 99 bp, Homo sapiens
cctcactcttcatggtcactgtggtgaagcagcgcttgcagatgtacaactcgcagcaccggtcagcaatcagctgcatccggacggtgtggaggaccg

SEQ ID NO: 881532 - DNA, 99 bp, Homo sapiens
acgactacgaggccttctagaaaaactgactgcaattgctcagcatcgaatgactacttacaagttgtatcacggactgattcaccgagcccaaccgta

SEQ ID NO: 881533 - DNA, 100 bp, Homo sapiens
cagtggcagtccatcgaggggacccttcacgatgcagtaggggtcgctgctgccagtgcctgggtgatggagagtttggtcccctcgatggactgccact

SEQ ID NO: 881534 - DNA, 98 bp, Homo sapiens
gcagatagcagagccatccttgggaaaatggacccaagtggggtcaaagtgctggaaacagcagaggacatccaggagaggcggcagcaggtcctaga

SEQ ID NO: 881535 - DNA, 99 bp, Homo sapiens
ccagatttgtattttccactcaacaccatctcttcccttggctgtgtaggttcaggagccatactcttcctttgttctgttgatttttctattgcttca

SEQ ID NO: 881536 - DNA, 99 bp, Homo sapiens
tcgccggtcttggggggatggttccatcatggcgtcaatgcaggaaatggctagtgatgagctgaaagagatgcggaaaaacttgaccaaagaagccat

SEQ ID NO: 881537 - DNA, 99 bp, Homo sapiens
tggagtggtttgtctgtgatggctggaagttcctctgtaccaggtttggtgcacctcgatttggaggaagtagggcagggcccttatctggaaagaagt

SEQ ID NO: 881538 - DNA, 99 bp, Homo sapiens
atcaggagtgtggtgccatgcatcttccagtctgatttgcaatctgttcttctaatttctgtagctccgatgtataggccattagtcgagcattgcaca

SEQ ID NO: 881539 - DNA, 98 bp, Homo sapiens
agatatgtatgatcttcccaagaaagaggacgctttactctaccagagcaagggcactcaggggcccagtgcattacctgttcctacaaggcaagctc

SEQ ID NO: 881540 - DNA, 99 bp, Homo sapiens
agatcggcattgctggacccgttactggggcttccggatgcagatgacgatgcgtttgaagagtacagtgctgacgtggaagaagaggagccagaggcg

SEQ ID NO: 881541 - DNA, 98 bp, Homo sapiens
cgcgctgtgcctgcgactgtggctctgcctgggactcctggacgcgtttgcctcagcatggagggcggggccgcggcagccacccccacagcactgcc

SEQ ID NO: 881542 - DNA, 99 bp, Homo sapiens
gagccgagatggcagcagcacagtccagcttttcctcgcaggagtagttgatcttcaggtagtaagggaagcccaggtatttctgcaaagagaggttag

SEQ ID NO: 881543 - DNA, 75 bp, Homo sapiens
gggacactgagctttgtggaagcatttggcggcataccaccctgcactgtgagcatgtagagcgcatgaagtaca

SEQ ID NO: 881544 - DNA, 99 bp, Homo sapiens
ctccacaataagtctgtactctgtgcgagtaggagggccatatttatctcggccacttcttctataaccatatccacctgactagatctcaatttctta

SEQ ID NO: 881545 - DNA, 99 bp, Homo sapiens
aaagcattctgtgaattggctgactccacttctatggtgagagagaggagtgcatcaaagattactcccagcttgacaaaagtaagctgaagccaggaa

SEQ ID NO: 881546 - DNA, 129 bp, Homo sapiens
tggaattaatcagactaatggagacccaagaggaagatgtggtcctactaactgctggagagcacaataaagcagaggatgatatggatggaatccacattgtggccttcgcagaggaagctgatcctg

SEQ ID NO: 881547 - DNA, 98 bp, Homo sapiens
cgaaggcgaccttccttgctttcagaatttcacccaggttctgacaggactttgcctcccgggccaaactggcagttcaaaaactagtacagaaagtt

SEQ ID NO: 881548 - DNA, 98 bp, Homo sapiens
cggaggggagcggagcccggagcgtcgtggaaagctttgggacccccgcccctggcttctcctccatgctgtatggaatgaagattgcaaatctggcc

SEQ ID NO: 881549 - DNA, 99 bp, Homo sapiens
gctgttccaggccatgagccaggctgtggggctgccgccctggctgcaggacccggagctcatgctgaagctaaaccagccccagaaatatttgaaaat

SEQ ID NO: 881550 - DNA, 99 bp, Homo sapiens
attttgtcgaagaaactgtggaagtcattaggaacaatggtgcaaggttcagaaagtgcttccccagtccactcacctctgggctccaggtcacagact

SEQ ID NO: 881551 - DNA, 99 bp, Homo sapiens
aaaggtgatctggacaaaggaacaggtatctcaggttttagctaaagaagatactgaggcagctattcaatcaatattatacaaagaaaattctgtaat

SEQ ID NO: 881552 - DNA, 99 bp, Homo sapiens
tcagagtcaaaacagagcttttggaatctgaacaagggaaacacagtgctctgtgcctatacagtgtacggataaaacagataaacaagaagcgctgtt

SEQ ID NO: 881553 - DNA, 98 bp, Homo sapiens
acctgtgggtcagcgggctgtcctccacaacacgcgctacggatctcaagaaccttttcagcaagtatgggaagatactctgacccatggatcccctg

SEQ ID NO: 881554 - DNA, 99 bp, Homo sapiens
accgcccaaccccaaaagagccaaactcagctcgcccggtttctcggcgaatgacagcacaggatactggtatcgggatgacacaggaagagctggtgt

SEQ ID NO: 881555 - DNA, 100 bp, Homo sapiens
tgactgcaactgcagtccactgcagactcatcctgttgctagaaggtttcccacaggaagatgtgagcttgtttccttggaatggacgggcgcttcagtc

SEQ ID NO: 881556 - DNA, 99 bp, Homo sapiens
cgccgccgctgccgccgccgcgcgcggcatggtgttagtctgtatattcaagataaagaaggcttgtcagctttggatcttgtaatgaaggatagacca

SEQ ID NO: 881557 - DNA, 98 bp, Homo sapiens
ctcacaccctcacgagtcatggatggcaagaggatctcctcctatgatgacaggaaagaccacagcaagattctttcattcgtctcctcctagcctgg

SEQ ID NO: 881558 - DNA, 99 bp, Homo sapiens
tgggcctactcgcccgccaccctgcgctgccgccgctctgaggagttaaagcttggagatttccttgattaagaagaatgaaggactgacctggccaga

SEQ ID NO: 881559 - DNA, 99 bp, Homo sapiens
ctctcaatgctaattcaattaacatacagccacgtaatccagatgatatacagtcattccaaaatgatgtgtaacccttctaacgatgacgatattcgc

SEQ ID NO: 881560 - DNA, 99 bp, Homo sapiens
atgctcactgccatcagctgcatcctccctatggcactggaatgcttctagtcacaacagacacccttggccatgactttcatgtcttccaaattctga

SEQ ID NO: 881561 - DNA, 99 bp, Homo sapiens
accccgcggccgcaccttcccgccttctcagatgaagggcgccctaatggagatcatccagctcgccagcctcgactcggacccctgggtgctcatggt

SEQ ID NO: 881562 - DNA, 98 bp, Homo sapiens
gtggaaagattatctcgtatcacacctgtattggcctgccaggacagagtgctcagagttttacagattgccacagatgaagacagcggaatcctcct

SEQ ID NO: 881563 - DNA, 99 bp, Homo sapiens
tttcattatggagggaggtttggcagatggagaacctgatcgaacttcgcaaagaacagtctgaacttgatcaagatttggatgatgttgaagaagtag

SEQ ID NO: 881564 - DNA, 99 bp, Homo sapiens
tcctgaggagctgggactacagtggacatttgggagcaataaaaataagaagaaaggaaaagccagaaaaatagagaagaaaggaaccatgaagaaaca

SEQ ID NO: 881565 - DNA, 98 bp, Homo sapiens
tactgcacagcagaagctctgaatcgtgttcctgaatgaaagaagtcaggatcatggggttgacagcagcattttccagaatcctaaaaagcttcatc

SEQ ID NO: 881566 - DNA, 98 bp, Homo sapiens
ttgagccacgtgcatgaaccaaacccacttcgttcaagacaggtgtttaagcattttcggtctgtcacccaggctaaagtgcagtggtgtcacctcgg

SEQ ID NO: 881567 - DNA, 99 bp, Homo sapiens
gacacttggaatcttcttttagacttcagtacgatgattgcagatgacatgtctaattatgatgaagaagggcaagttaaagtcttcagagccctgtat

SEQ ID NO: 881568 - DNA, 100 bp, Homo sapiens
ctgtacaccccatcccagacgaagacagtccctggatcaccgacagcactctgtgctgtcggtgatccagggactgtcttcgtctgggatggggtgtaca

SEQ ID NO: 881569 - DNA, 100 bp, Homo sapiens
ggctgcgggaaatcgggctgaagttgtgaaagctcgttcgtcttaattctgttcagatctccatcgcggactcagtcgcttcagcccgatttcccgcagc

SEQ ID NO: 881570 - DNA, 98 bp, Homo sapiens
acaaaatgatatcagaaggactagacccagatcttcttgagggcccagaggacacagcccagttggcccacgccgtcctggccaagctgaacgccttc

SEQ ID NO: 881571 - DNA, 99 bp, Homo sapiens
tcctgctgccggatgacattgaggacgagtccacgggcctgaagaagatctctccagcgaacactgaatgagttaaaagagtatcaaaagcagcatgac

SEQ ID NO: 881572 - DNA, 99 bp, Homo sapiens
ctgcctccccagcaaatcgagaaaaacctcagcgacctgatcgacctgtaatctatgccagcaattatgacaatgttagcagaccatgcagctcgtcag

SEQ ID NO: 881573 - DNA, 99 bp, Homo sapiens
agatccgtggttccctgcagactggcaggagcagattccaaaggcacaggaagaagcttgcagggggggccctcagcctcttggccttgaacgggctgt

SEQ ID NO: 881574 - DNA, 99 bp, Homo sapiens
cccagattgcttagacctgtggctcccttttctgtgggaaatttcagtgcagcagcctcttaggccactcttaattcagcccaacggaaagtccaataa

SEQ ID NO: 881575 - DNA, 99 bp, Homo sapiens
tctcccaaggtgctgggattacagtcctcaggttctgaatcttgtgcctggagaaccagagaggaccctggagcaggaggagaaagagaagcttgtctc

SEQ ID NO: 881576 - DNA, 99 bp, Homo sapiens
acgacttactctctacccttggcagaacctgctaaggctgcctcagacctgactgcctggttcagcctcttcgctgacctcgacccactctcaaatcct

SEQ ID NO: 881577 - DNA, 99 bp, Homo sapiens
ggtcatccacgaagtagaagctgtcagactgggtctcatacgggtggcggatcatctcgctgacatggctgggctggcccacacagccttccccaagag

SEQ ID NO: 881578 - DNA, 99 bp, Homo sapiens
gattataagaagagaaactcagcgctggggaagaagacgaaatctcacaaaactgtcccttatcttcagtcacatgctggcagaaatcaaagcaatctt

SEQ ID NO: 881579 - DNA, 99 bp, Homo sapiens
ccttgcccatgctgaagcagagcaatggaagcattgttgtcgtctcctctctggctggattatctgggagcttgcattgtcctcactgcatctatagca

SEQ ID NO: 881580 - DNA, 98 bp, Homo sapiens
gacctaagggcggcgactacgacggcgttgatatcggtggtaacgacggcctcagcaggcggggaagatgaaaggaaggaagaatcctgctcaaaaat

SEQ ID NO: 881581 - DNA, 99 bp, Homo sapiens
ctggattcaccaggaagaagaaaaagagatacaaatgcaccagaaagttttaaagattaataaagaactcttcagaattcctggtgtttcatcatatat

SEQ ID NO: 881582 - DNA, 98 bp, Homo sapiens
gatgataaagatgatgatatccttctcaaccttgtgggatgtgaaaactctgttactgaagcttgtgttttctgtcgaaaacatgatgactgtcctaa

SEQ ID NO: 881583 - DNA, 99 bp, Homo sapiens
cactagtgattctgggagcagcagtctttctgatatctaccaggaccaagccatatgtccttctatgttcgagcccacaaagggtcaacactttctcag

SEQ ID NO: 881584 - DNA, 99 bp, Homo sapiens
ggtgacaagaacggcggtacccgggtggttaaacttcgcaaaatgatcttgcaggagagagagttactgcctgtgaagaaatttgaaagtgagattctg

SEQ ID NO: 881585 - DNA, 99 bp, Homo sapiens
gttagtgtgctctgagggagggtccgagccagccgctgttttgccggaggagcccctcaggccgaatcgggagcttgccatcctgttgggcatgctgga

SEQ ID NO: 881586 - DNA, 99 bp, Homo sapiens
aacatctgaagcagaagtacccccaccacgcctctgcaatcatgggtcaccaagagaggctgagagaccaggatactgctggtcaagagaggtttagaa

SEQ ID NO: 881587 - DNA, 98 bp, Homo sapiens
gcgtttagagaaaatggcagacgatattgatattgaagcaatgcttgaggctccttacaagaagttgaaagtttgatgattacccccttcttgcctgt

SEQ ID NO: 881588 - DNA, 99 bp, Homo sapiens
gatccggaagcacagccccgaggtgtgcgaagccaccaagaacctagaaagattgtacaatgaatggtgattctcgtgctgcggtggtgacctcaccac

SEQ ID NO: 881589 - DNA, 99 bp, Homo sapiens
tggtcctctggtcttccctgaccccgcggccggacgacccaagcccgctgagcaggatgaggcaattctgtggtgttcttggtcacacatttatggagt

SEQ ID NO: 881590 - DNA, 99 bp, Homo sapiens
gcaagttttcacttatctcgaaagcctatcagcatagttaagagcctgccttctggtacaagatgcctgtggaatgttcggtgaagtgcacttggagtt

SEQ ID NO: 881591 - DNA, 99 bp, Homo sapiens
gacctttgatgagaactcagctgtccagccctggtacctgacagtgtaaagaaggagctcctacaaagaataagaacattccttgctcagcatgccagc

SEQ ID NO: 881592 - DNA, 98 bp, Homo sapiens
tcatcaccacagacagcgatggcacctacaggaggccccccggcgtccacaactcagcctacatcggatgcccacctcgtcacgtgttcaatatgcta

SEQ ID NO: 881593 - DNA, 99 bp, Homo sapiens
gacagacttgtcactggatttagagtctctcagctggtacacggcagggtcagggttctggatatcttgtttgcacacagtttgatgagtccttaaaga

SEQ ID NO: 881594 - DNA, 99 bp, Homo sapiens
aatgcagaccctcgacctccagtgcagttcccaagtttcctcttctactaccacgtccacaaccggcctccgctggaccagcacatccactcactcctg

SEQ ID NO: 881595 - DNA, 99 bp, Homo sapiens
cacgactctgaccagcacccacactcaggctctggccgcagtgtcctgtcattcgagtcaggtcgtgttttcgcctggggcatgggcaccaactaccag

SEQ ID NO: 881596 - DNA, 98 bp, Homo sapiens
gaaaacttcctggaaccagaatggcagcgttaaaagccaagtataccttgctgcatgacgccgtgatgaggaaatatgagctgtacagcatggactgg

SEQ ID NO: 881597 - DNA, 75 bp, Homo sapiens
gtggttttcctgaagcagctggctagtggcttattacttgtgactgaggagaaggcagagcccccccaggctatg

SEQ ID NO: 881598 - DNA, 99 bp, Homo sapiens
agaaagtgtcatttttattccagagcaacttctgaagaattgcatacgtttagcctttcctgaactactccatgtacaatttgtgttctgctcatttag

SEQ ID NO: 881599 - DNA, 138 bp, Homo sapiens
ggcgagtaagatggaagatgaggaggtcgctgagagctgggaagaggcggcagacagcggggggcctgatggaggagtttgtggggctgcgtgaaggctcctcagggaaccctgtgactctgcaggagctgtggggcc

SEQ ID NO: 881600 - DNA, 98 bp, Homo sapiens
agaagcagatgcgcattttgatggatttgagttctgtgaacctgcatttgttgttggtaattgcctccagatagcttctgacagtcatcagtatgatc

SEQ ID NO: 881601 - DNA, 99 bp, Homo sapiens
ttttcagatgactggactcttagtggaaaggatattcaaggggttcgaacccatgaactgaagccctatgtcatatttataaagccatcgaatatgagg

SEQ ID NO: 881602 - DNA, 98 bp, Homo sapiens
caatctagcgacaaaacaaactccaaaagaaggtgtgaaagttaacaagtgaataaccctataccttccaatttgaaatcagaagcaaaaaaggctgc

SEQ ID NO: 881603 - DNA, 99 bp, Homo sapiens
aggaaggctgtgagcaagctgtatgcatccaaagcacacatgaactcagtgctcatggggatgaagaaccagctcggaggcgatcgagatcggatgaca

SEQ ID NO: 881604 - DNA, 98 bp, Homo sapiens
tacgctccgctccgcgggccaagaaactggagaaactcggagtgtactccgcctgcaagattctgcttctcagaagatgcactattatagatactcta

SEQ ID NO: 881605 - DNA, 99 bp, Homo sapiens
ggtgatggaacaacaactggtcaattcaggtacgtcttcaaataccatctcagcaggctgggagccaaatgaagaaaatgaagatgaaagagacagaca

SEQ ID NO: 881606 - DNA, 98 bp, Homo sapiens
acagctccagggaaggcactcaaaagtggggggcaggaaaggttttgctgttactgctcagtgtagtcacaccttgaataagaaatggaaaaccttgg

SEQ ID NO: 881607 - DNA, 99 bp, Homo sapiens
tgctctgtctgtcgtgcgggacctggggttttttgggatctacaagaaatcgacttaaagcctccagagaagtagaatctgtagaccttccacactgcc

SEQ ID NO: 881608 - DNA, 99 bp, Homo sapiens
agtgctcttcgaagtggcctgggaggtggctaacaaggtgccccctgtcctggagccggtggagttccagaatgacgtggtggtggttcgtggctccct

SEQ ID NO: 881609 - DNA, 98 bp, Homo sapiens
tctctcatctcgctcggctgcgggaaatcgggctgaagcgactgagtccgcgatggagaggcaaatttctggagatgtgcaatgatctcttagctaga

SEQ ID NO: 881610 - DNA, 99 bp, Homo sapiens
gggaggccaagcgaccacccaaagaagatactgcttctaaactaggacccatagaagctatccagaagtcagtccgattgtttgaagaaaagaggtacc

SEQ ID NO: 881611 - DNA, 98 bp, Homo sapiens
tttggagaccagaatgatgatactctgagaaagcatgggattatggcaaccacagaatctcagtagtacaagttccattcagttttttctgaaagaaa

SEQ ID NO: 881612 - DNA, 99 bp, Homo sapiens
gcccatgaaaattgttctgctgatttacaggtttctgcaaagattgggtttttgaagtggatgaaaatactaggaaaagtttatttaagttacgttcta

SEQ ID NO: 881613 - DNA, 99 bp, Homo sapiens
ctaaaggtgacactgcaaatgaaattggacaggttcagcagactgtacaggatctttttggcagagccccaagtaaagctgtcaatcctgatgaggctg

SEQ ID NO: 881614 - DNA, 99 bp, Homo sapiens
ctttttattaggtcctgttcctgtagcaacttcattgcctaccttcactttaactgccattatttgcccacttggtttgtggaccattttgttgacaga

SEQ ID NO: 881615 - DNA, 99 bp, Homo sapiens
gaacacgctggacagcgataaggaagtgaccaagttcactcctggatgctagctacaagccaagccttagacactgtctggagaatggcaaaaggcttt

SEQ ID NO: 881616 - DNA, 98 bp, Homo sapiens
tagaacagaaaacagtctgtggagagaatctgcctcctttaacttatgaccagatatgtgtcacaaagatgtctacacggaactgccagggaatggac

SEQ ID NO: 881617 - DNA, 99 bp, Homo sapiens
catcagtgcctttggttcagttctgagtgatcctaaagccaatggtaatgatagtaaaaaatttaaaggagaagataaaatggatggtgctccttctcg

SEQ ID NO: 881618 - DNA, 99 bp, Homo sapiens
gccggaacctcaagaaggaggtcagccgggtgctgtgcaagcggtgcgcttctgaaccgaatctgaaattacggtccaggctaaagcagaaagtggccg

SEQ ID NO: 881619 - DNA, 99 bp, Homo sapiens
tcacccaccgtatcaggatcgtgcaggatacagcaccacccctcaattattactgggttcctatactggtggccaagcaagaggagttcttcaacctgt

SEQ ID NO: 881620 - DNA, 99 bp, Homo sapiens
ggaaagtgattgtgaaaacaatgaagacttatgttgaaaaggtggctaatgatcaagacttcaaatcccaaaagaacttcatcattaacatgacttgca

SEQ ID NO: 881621 - DNA, 99 bp, Homo sapiens
gttcgccgatgggaaacccggagaccaaatccttggttctcagaggcactgtgactgacttccctggatttgatgagcgggctgatgcagaaactcttc

SEQ ID NO: 881622 - DNA, 100 bp, Homo sapiens
ctgctgcctctgctgaatgtggagcctacagacactggcaacattgcggacacccggatcagtgtggccccggaaggctccacattcagcagaggcagca

SEQ ID NO: 881623 - DNA, 99 bp, Homo sapiens
cggggcggctccgcagcccgccgggagctctgaccgaggcgcctcgctggggcggggaccttgccttgcccgggacggagtcttgctctgttgcccagg

SEQ ID NO: 881624 - DNA, 99 bp, Homo sapiens
gaatgccctgaaagatcgagcagaggcctatttgatagaggaaatgtatgatgaaggtgttacacataatattgcattacttcgagaggtgataatcaa

SEQ ID NO: 881625 - DNA, 99 bp, Homo sapiens
gagggagtgcgccgggagcggagatatgagcaagtgcaccggcacctggaccaacacgaagtgagatacctgcagtttgccttccgctggatgaacaac

SEQ ID NO: 881626 - DNA, 99 bp, Homo sapiens
gaggggctccggctggtctgtggtgagtgagcagtgtccatccagcatccacgtttccagccatccaaggtgcctcactgcctgccctgaccacacagc

SEQ ID NO: 881627 - DNA, 99 bp, Homo sapiens
cgtcgcctcttcctttttcgacgcctccgccgccgcctgaggaggcgagctagccgggagttacaccgccaccgccagctcctacagaagaagggaaaa

SEQ ID NO: 881628 - DNA, 99 bp, Homo sapiens
gaggtgccaagaagcagcggtacacgttacctgtgcatgacagatgagtggttctctgagtatgtctacgaagtggtggtggacaggaagcatgtccct

SEQ ID NO: 881629 - DNA, 98 bp, Homo sapiens
gaaatgtccatccagttgggagctatgagtcctctgaaatgaacagcatagtgacttctgggggaacagaaagcatactgatggcctgcaaagcatat

SEQ ID NO: 881630 - DNA, 99 bp, Homo sapiens
gccagccaagtgaagacatgcttacttccccttcaccttccttcatgatggtggacgtctgatttatgaagctccccatccacctatctgagtacctga

SEQ ID NO: 881631 - DNA, 99 bp, Homo sapiens
gaagggaccatgtggctgccttgggctctgttgcttctctgggtcccagggactgtatgctgctgggatgcctgaacagtggtaccagttttgtgtctg

SEQ ID NO: 881632 - DNA, 99 bp, Homo sapiens
ggcgacctgggcaccagcaggacccgaggccaggagccaggggcccagaagatgtcacacaccaagccctacatcaggaagaaggctgtgctgatcatg

SEQ ID NO: 881633 - DNA, 99 bp, Homo sapiens
cttattcctgtccggagacagcctaaggccctttgaggtggacctttctcacgtgtatcttgcctatactgaggagagtctgcgtcagtctttgatgaa

SEQ ID NO: 881634 - DNA, 99 bp, Homo sapiens
cttcatcctcgaggcctggtggctaccggctcttttcatcttcacggccacccacagaaatgaagcagagtggcctagaattgctggaatccacaaata

SEQ ID NO: 881635 - DNA, 99 bp, Homo sapiens
ggcggagacggagcggggcctgtccaggaagcacataatcgaaggtattattctcactaaggttggttactatactattccatctatggatgaccttgc

SEQ ID NO: 881636 - DNA, 99 bp, Homo sapiens
aaaatggcagacgatattgatattgaagcaatgcttgaggctccttacaagaaggttcaagattatctaagaagatttgaaagtataccagatatgctt

SEQ ID NO: 881637 - DNA, 99 bp, Homo sapiens
tctgcggctggtccaggccttccagtacacagacgagcatggggaagatccaattctggtacagcagttgcgccggacatacaaatatttcaaagatta

SEQ ID NO: 881638 - DNA, 99 bp, Homo sapiens
agcgctcccatgggggtatcgatgtgaaggatgatgatgctgaagctatccttgctgcagacttcgaaattggtcactttttacgtgagcgtataatcc

SEQ ID NO: 881639 - DNA, 99 bp, Homo sapiens
ccgtaccgcagcagcagcttcaccacctgagccactttaattgaattctgggtagagccaccagcatgatattcgactttgaattttttcacaagttca

SEQ ID NO: 881640 - DNA, 99 bp, Homo sapiens
gcagattgtcctgtaatcgctattgacagctttaggcatatgtatgtgtttggagacttcaaagatgtattgaatggaagttggatacactttgtgact

SEQ ID NO: 881641 - DNA, 99 bp, Homo sapiens
atgaaattatatctgagaactggggagggactcccggaggctgacgggaaagccaaagagcagaagagacgctcaaaccgccaagttaagcgaaaaaaa

SEQ ID NO: 881642 - DNA, 99 bp, Homo sapiens
aggtcgtgtttccaaagagaaaaacctactcttgatacacaatctaaaaagaattaggaaggtccttcagatgcatcatcccattcagatgaaacctgc

SEQ ID NO: 881643 - DNA, 99 bp, Homo sapiens
tcagaaacctgaagttagaaaggctcaacgagaacaagctatcagagaattcagatgacccgaaggcagtctgtaggacgtggccttcagttgactcca

SEQ ID NO: 881644 - DNA, 98 bp, Homo sapiens
gaacttttaagtggagtggtggatcagaccaaagatgggaaattatgatgtgatgaccccaatggttgatatacttatgaaactttttcgaaatatgg

SEQ ID NO: 881645 - DNA, 99 bp, Homo sapiens
atttctatatctcgaataggatctacacttccttcaacgtgcgtgatatcatcatcttcaaaagcacctgaaactttctccttaaggcctgcgtcatca

SEQ ID NO: 881646 - DNA, 99 bp, Homo sapiens
attggactgggagactcagcaggcctgctgaaaatgactgaatataaacttgtggtagttggagctggtggcgtaggcaagagtgccttgacgatacag

SEQ ID NO: 881647 - DNA, 98 bp, Homo sapiens
ttggttgactactccggagcagccactaagagggatgaacaggcctgcgtggaaattgaatgagattattccgtcctatttcagtgttccgggaagcc

SEQ ID NO: 881648 - DNA, 99 bp, Homo sapiens
caccaaggtggacaagaaagttgctccttcggcattccctgcagtgcagtacctatctcagccacagccacagccctatgctgtgcatggccactttca

SEQ ID NO: 881649 - DNA, 98 bp, Homo sapiens
aaggagagggggatgaagaaatctgccaggagggtgcctcccgccagtatctgatgaaggtaagagaatcttgcctcctggaatccttcaaatcctga

SEQ ID NO: 881650 - DNA, 99 bp, Homo sapiens
acagcggcagctccagcccggcccggcagcgacatggaagatgttctcaaatagtgatgaagctgtaatcaataaaaaacttcccaaagaactcctgtt

SEQ ID NO: 881651 - DNA, 99 bp, Homo sapiens
actgtcacagaactctgtaaatctgtctcccagcagtcacgcaaacaacttatcagtagtgacttacagtaagctaaaagatggcggcaaggcagccca

SEQ ID NO: 881652 - DNA, 98 bp, Homo sapiens
ttagtgaacgtggacaaagctgttgtctcagggagcacagaaatggaccacacatccccgacctacatgcttgctaacttaacccacttgcattctga

SEQ ID NO: 881653 - DNA, 99 bp, Homo sapiens
gcagtttgctggatttcctgaagagcgatgaaggtggcaaagtgctgcttccaaagctcattgacttttctgctcagctgtcaaagctcgaaaaacagc

SEQ ID NO: 881654 - DNA, 99 bp, Homo sapiens
ctggcttcctgttctgcagatatgaccattaaactatgggattttcagggctttgaatgcatcagaaccatgcacgtagagacggggtttcaccatgtt

SEQ ID NO: 881655 - DNA, 98 bp, Homo sapiens
aatgggaaatctagaagaaatatgttctttccagcaaatgctcgtacagtctttagaagaatgcaccaatggccctcagattctcagcttgattctaa

SEQ ID NO: 881656 - DNA, 99 bp, Homo sapiens
agaagctccagatggcgtcttccgtgggcaacgtggccgacagcacagtggaggccatagtggagtttgactaccaggcccagcacgatgatgagctga

SEQ ID NO: 881657 - DNA, 99 bp, Homo sapiens
tctcagaagaggaccgcggaggccaaagggaagtgaccatccccccaaatcgggtcctgagctatcgagtaaagcagcttgtcttccccaacaaggaga

SEQ ID NO: 881658 - DNA, 99 bp, Homo sapiens
tgctgcggaggcgttggagcgcggaaatctggaaccgggatggcgacgtctacactgagtcggaggcgaagcctggagcattggtaagcgtcacactgc

SEQ ID NO: 881659 - DNA, 98 bp, Homo sapiens
gattataatttggtgctgtttgtagagatgacaacactgataaaatccactcattgctggaatcacatgcagcccaactacagattcttatggaattc

SEQ ID NO: 881660 - DNA, 99 bp, Homo sapiens
cagggcttcgccagcgggccagcaacaaagtgcaagcggtgaccacccgtcaggtgcgtaccattgtggaagaggtccaggatggcaaggtcatctcct

SEQ ID NO: 881661 - DNA, 100 bp, Homo sapiens
atgggcatcttctccaatagtgacatcgccttctttcagggcacatgtcagttggtgaatgcttctgctggcatgttctgagaccagccactggcctcca

SEQ ID NO: 881662 - DNA, 99 bp, Homo sapiens
tctgctccagctcgcagcccgctgctggatccagatgtaccagctctcgaggttgcttcatgattaccacagagacctctacaatcacctggaggagca

SEQ ID NO: 881663 - DNA, 99 bp, Homo sapiens
ctcctgaatagctgggattacagtgtcaacctaagaaaaagtctacgccactgaagtatgaagttggagatctcatctgggcaaaattcaagagacgcc

SEQ ID NO: 881664 - DNA, 99 bp, Homo sapiens
agaaacaaaaatcaccctttgttaggtactgaacgacacctgggtctccttcccttcctggtctgaggactccacgttcgtcagctccaagaagacacc

SEQ ID NO: 881665 - DNA, 99 bp, Homo sapiens
cagcgtctcctctgccaaaacccagggctggaagatgtggcagccggccacggagcgcctgcagaaactcagccacctgtgacaaatttgagtgtctct

SEQ ID NO: 881666 - DNA, 99 bp, Homo sapiens
ggatttcgcaatttaagatttgtagtgactacatctgtgaaggggcctgaccagataactcccaggaatctcgcagataatccaggctgttggaccttg

SEQ ID NO: 881667 - DNA, 99 bp, Homo sapiens
gatttctgcatttccatctgagctggcaaacttccccagactctgcgaggaaacggaaaggattgttgctaaccacattcgtgagcgagaagggaagac

SEQ ID NO: 881668 - DNA, 133 bp, Homo sapiens
accgggatcgtgaccgagaccgtgaccgagagcgtgaccgagagcgcgaatatcgtcatcgttagaaggggcctttatcatctgctggactcctggattggttttgttacttctagacgtgtgctgtccacag

SEQ ID NO: 881669 - DNA, 99 bp, Homo sapiens
aacactggagatcagcaccaaatcccacagaggcatctgaggttcgggatgagtatcggcaggactacgatgctgggagaggaggctatggaaaactgg

SEQ ID NO: 881670 - DNA, 99 bp, Homo sapiens
gcctatccaactgttaaattttatttctacgaaagagcaaaggacatggatttgattgacatactttggaggcaagatatagatcttggagtaagtcga

SEQ ID NO: 881671 - DNA, 99 bp, Homo sapiens
tgaccggttacttaatgtctggctgtggaaaatctctgttctcacaaagtctccccaatgctctacaagcaactgcgtcaggcctgtgaagaccacgtc

SEQ ID NO: 881672 - DNA, 99 bp, Homo sapiens
atatatgttcaaccactcagattataacatggttctagcatctgacaggatggcatctgatgactttgacatagtgattgaggccatgctggaagctcc

SEQ ID NO: 881673 - DNA, 139 bp, Homo sapiens
tttgaagcttttgtggcattggcggtcctagtaacacttatcattggagccttctacttcctttgcagtgcatgctgggaccgcgacggacaggctgccgcaccccaggcccccagaggccagtctgtttgcctcccaa

SEQ ID NO: 881674 - DNA, 99 bp, Homo sapiens
gagcatgaatggagcaaaatggcggatcatgtgcagtgtcttgggacaaggtgcgcattcctggtgtgctgcagcgattgggagtgacatactttgtgg

SEQ ID NO: 881675 - DNA, 99 bp, Homo sapiens
gagccctgccgaggagctgaaggccttcagagtccttggggtgattgacaaggagaagctaaaacttacttatgaggaaaagtgtgaaattgaggaatc

SEQ ID NO: 881676 - DNA, 99 bp, Homo sapiens
ggccaaggaaaaatcgagcagaaagaatgtctttcaggtaagcagaattttgtacagtttctgtacagcattcaaacgttcttccagacaagtgtctga

SEQ ID NO: 881677 - DNA, 99 bp, Homo sapiens
gtccagcaacaatgatgaaggcagaccacagacattttcctgaatgggaggtgaccaagaatatggcccaggtgaccaaagccctggacaaggccctga

SEQ ID NO: 881678 - DNA, 98 bp, Homo sapiens
acagaaccctgggaggggaattccagcaccgcagcaaccactccagaaactttccctccttcagtgcctaagaatcctggtgacaaaaagcctgtcaa

SEQ ID NO: 881679 - DNA, 98 bp, Homo sapiens
caggcttggtgcaggaaggagagcccttcagcgaggaagctacacttttcaccaaggaactggtgctgcagcgagagactatgtcttcagcagtggtg

SEQ ID NO: 881680 - DNA, 99 bp, Homo sapiens
ctcgcccgaccccaacctccggattgatgaggtagctgtgccagttcatgtggccaaaattctaacttttcctgagaagtagagacggagtttcaccat

SEQ ID NO: 881681 - DNA, 99 bp, Homo sapiens
cccgggccatgtcggtgggcgagctctacagccagccactgaggcggctcccagctgcgttggcgacatggccgacacccccagagatgccgggctcaa

SEQ ID NO: 881682 - DNA, 98 bp, Homo sapiens
cctggagttggagacaattcctggttcagaatttaaacatctttctaggactgaaatgcaactgcagaagcaacatgtgaccttttagagatgcttgt

SEQ ID NO: 881683 - DNA, 98 bp, Homo sapiens
aaaaagacaaatacaagtgaaaaaaatagactaatggattaacgtccctgtcgtgtgacattttctgaagcatcaagtgtacctgatttgtgaaccta

SEQ ID NO: 881684 - DNA, 98 bp, Homo sapiens
cagcctcaggcgtgcgcggacggtgtgcggttgtaggtcaaagacaatcatcaatgatgccttttactttagaagagctgataatgttgtctcgatgc

SEQ ID NO: 881685 - DNA, 99 bp, Homo sapiens
gaaagatttgttggatcaagagaaagaaagagaagaactacttcttttggaaatgcttcgagcaaatgctctcatcaaaagaggcagcatgtacatgca

SEQ ID NO: 881686 - DNA, 98 bp, Homo sapiens
gcaaaaatcccatctaccgcaactctcagttcgagagtaaaggaagcagcgacagcagtatataccttactagtagtgtttattcttctaaaatctcc

SEQ ID NO: 881687 - DNA, 99 bp, Homo sapiens
cgctgttctcgctccggagccgctgcacatttcgggaaggaaactgaaaaggccaaggaacgatacgacaaagccacaatgaaacttcatatgttgcac

SEQ ID NO: 881688 - DNA, 99 bp, Homo sapiens
acacatattcatcatcatgggtgcatcgcttcctgcctgacacagctcacttcaagaagtgcacaatgtcagaacgtggaattaagtgggcttgtgaat

SEQ ID NO: 881689 - DNA, 99 bp, Homo sapiens
gcctcctctgggagctcattaggaccatggtggatcgggcagaggcgaaggtgaagcagatgcaccttaacttcatggatgaaaaggatcggatcatca

SEQ ID NO: 881690 - DNA, 99 bp, Homo sapiens
gtcgccttacttcctgcttaagccagcacagaagtgtctggagtggttgattcacaggatgaaatctttgacatggtaaaaccaaaggatcctttgaaa

SEQ ID NO: 881691 - DNA, 99 bp, Homo sapiens
gccgggagcccgccgcgctggtagcggcaaggggagagccagttgcgcagagccctgcaaccagcagtccagggagaagtggtgaatgtcatggagccc

SEQ ID NO: 881692 - DNA, 99 bp, Homo sapiens
caagatggacttggcggatcttacagagcagcaggacggtgaagtgattggaattaacactttgaaagtgacagctggaatctcctttgcaatcccatc

SEQ ID NO: 881693 - DNA, 99 bp, Homo sapiens
acccctgctacgtggagaaaacctcggataaggtcccgctcccggtcccctcggaggagagcccactcccctgagagacggagggaagagaggagtgtg

SEQ ID NO: 881694 - DNA, 98 bp, Homo sapiens
atgaatcatggaaactctcttctggagaagataacactttagtacagtcgccaactgatgtctacagcataacatggcttgaagtaaaaggcagtatc

SEQ ID NO: 881695 - DNA, 99 bp, Homo sapiens
ccaactccttcttcccacgctgctactgcctgggggctgaggatgacaaaaaagccttcatagtattatgatgacacattcccctccatgaaggagcag

SEQ ID NO: 881696 - DNA, 99 bp, Homo sapiens
atggatttgtttctcattctcatatttcaccaataaaggctgtggatctttccattgatgagtccagcttgacaggtgagacaacgccttgttctaagg

SEQ ID NO: 881697 - DNA, 99 bp, Homo sapiens
ggcacccgaagaagagaccatccatatttccagtggggatcagcagtatacttgtgttataaaaaatcggtggcaaagacgaacactgtatcttacaaa

SEQ ID NO: 881698 - DNA, 99 bp, Homo sapiens
agtcttgaatgactggaaactgattggaaactctttgggaaagccactcgaaaaggaaagatactattcaagtccagtacatcataatgcagaattctg

SEQ ID NO: 881699 - DNA, 99 bp, Homo sapiens
catcctctccaccaacattgctgagacctcagtcaccattgacgggatccgcttcgtagtagattccggtgaactgtcacccctacaactcagcttgca

SEQ ID NO: 881700 - DNA, 99 bp, Homo sapiens
aggtggcttgggccaagcttttccccaagtcagactccaaaggaagtggacctattcagctgtggcagtttctcctggagctgctatcagacaaatcct

SEQ ID NO: 881701 - DNA, 99 bp, Homo sapiens
cctgcctcctgcctcctctcctgcaaccagaggcttgcagtgagctgcatactccatcgctagatcgaaagccaaatagttttgttgcggtgagtgtca

SEQ ID NO: 881702 - DNA, 99 bp, Homo sapiens
gcgtggagtgacggtgccaccgcggcgcgctactgcagcactggggtgtcagttgttggtccgacccagaacgcttcagttctgctctgcaaggatata

SEQ ID NO: 881703 - DNA, 99 bp, Homo sapiens
gtcgccgctctccatcaaacaattcctggacttcgtttccaagccagcgccctactgggaaggaacagctgtgatcgatggagaatttaaggagctgaa

SEQ ID NO: 881704 - DNA, 99 bp, Homo sapiens
ccaggtgaagctgtgggtgaagatggtgactccactgatcaagaacttcttctgaggacagacaggaatccctttgcccacgtccagctgaagccgaca

SEQ ID NO: 881705 - DNA, 98 bp, Homo sapiens
gcaggctccggaggcggcgggacagagcgcctgcgaccccagtcggtgctccggggaggtcacctgacgaggaggccttcctgatgcgcttgcctgct

SEQ ID NO: 881706 - DNA, 99 bp, Homo sapiens
aagcatcttgatctagaaaatataacgggatgaattgtaaaagcaacatcagcttgaccagtataaaattacagtggattgctcatctcagtcctcaaa

SEQ ID NO: 881707 - DNA, 98 bp, Homo sapiens
taaacctaattctgcccttgatgtcacaggatctcttgaaggtcagagatgtcatcatcgctgcaagcgttgcaggaatgggcttggcagccatgagc

SEQ ID NO: 881708 - DNA, 99 bp, Homo sapiens
aagagatttgggcaacaactatgactgcctcgctttgccagagaatcaccgtagtctgctggcaaagtccgcttgctggactttttctgctcatgttca

SEQ ID NO: 881709 - DNA, 100 bp, Homo sapiens
ccagtatattcaaagctacagtaactgggtaccagcttctggtggagactttactcttacccgttatgtcaacaaatcccttgtagctttgaatatactg

SEQ ID NO: 881710 - DNA, 100 bp, Homo sapiens
agagaatgatggtcagaactgcctggatggctacatatacaccggaaaactggtaagtttcaaacattacagtctccgggcctttctcttcatcattctc

SEQ ID NO: 881711 - DNA, 99 bp, Homo sapiens
ttcccgatttcatgcaatactgtggcacaagcatttggatgatgcatgtaaaagcaacaggcctcagttgggtggaaagctttggacatgaagggcttg

SEQ ID NO: 881712 - DNA, 99 bp, Homo sapiens
atgacagtgacttcttcaccagctattacactttggggaatatatatgcagttcctaaaagtaaagctctagaggccgtcaaattggcaatagaagccg

SEQ ID NO: 881713 - DNA, 98 bp, Homo sapiens
gatcgcttaccctccgggggtaaaagagatcaccgacaagatcaccacggacgagatgatcaaacgcctgaaggaaagaccacagcaagattctttca

SEQ ID NO: 881714 - DNA, 99 bp, Homo sapiens
ccgtgaatgagaaaaatggagaaaacaagacaagcccattcattcatttgagcatagcaagtgccaggattgctgagtattcccagttgtatgaccaga

SEQ ID NO: 881715 - DNA, 99 bp, Homo sapiens
ccgccgctgcgggcccgctccgacgcggaaggtggaacctaacttcttgtggaacaagtgttgccagctcagaaggcagtgaggagctgttttcatctg

SEQ ID NO: 881716 - DNA, 99 bp, Homo sapiens
gccacccgtcagtcctgccaatttacagtgagcttaaagagtgggtggaattaaagacaaagtgctggcggcacacagagcgggactgaagcaagtcat

SEQ ID NO: 881717 - DNA, 99 bp, Homo sapiens
tgtggtttttgattcaagtcctgttctacctactgccaattggaaagaaagaaattttggcgctaattccaaaccagaatgctcttctaaaggacttgg

SEQ ID NO: 881718 - DNA, 98 bp, Homo sapiens
atctgcagtatcttctcccctgttggaccagcagaggtcatcaaccccatgggatgggatgcttttggattgcctgctgaaaatgccgcagtcgagag

SEQ ID NO: 881719 - DNA, 99 bp, Homo sapiens
atagttaagaaaatcatcgaaaagatgctgaacaggtatcgggggaaatggattcgggtagaacgaagtcgagagatgcagatgatagacttgcagacg

SEQ ID NO: 881720 - DNA, 99 bp, Homo sapiens
aaggggagctggctacttctcgctctgcttcatcccactattattttggcacaacaggaagattctggacaatcaggaagtccaagccacaatgatcct

SEQ ID NO: 881721 - DNA, 98 bp, Homo sapiens
gaggagatgttccagccttacagctccagtatgaccattgtaaggttaaaaaagctccttgaacaagaaaaggcttatcaagcccgcaaagaaaagga

SEQ ID NO: 881722 - DNA, 99 bp, Homo sapiens
acggacagtgcagggaagcaactgcagaggcccctaattgctaagaagaatcctaagatcccaatgtctaagatgatgaccatccttggggccaaatgg

SEQ ID NO: 881723 - DNA, 98 bp, Homo sapiens
tcaggttgctgccagacccaaaaatacaccagctccaaaaccactcgcatctgagcctgccgatgacactgtttgcaggtcgaagtaagaaggaaacc

SEQ ID NO: 881724 - DNA, 99 bp, Homo sapiens
cctcacctttatggaacaccttcccgttgaggagctcaagcttgggaaaatggtgtgcattccttgtatcgtcattccagttctgctctggatctacaa

SEQ ID NO: 881725 - DNA, 99 bp, Homo sapiens
ctcccaaagtgctaggattacagcttgctactccagaaaaagcttcataagtttgagttggcctgtttggccaacctttgcccagagactgctgaggag

SEQ ID NO: 881726 - DNA, 98 bp, Homo sapiens
agttggccaagcacgccgtgtccgagggtactaaggccgtcaccaagtacaccagcgctaagtaaacagtcttgggcgtctttggtactggctttttt

SEQ ID NO: 881727 - DNA, 98 bp, Homo sapiens
gaagcttttgcacgagaacatggactcatcttcatggaaacgtctgctaagactgcttccaatgtagaagaggctggagcattggatttgctaaagga

SEQ ID NO: 881728 - DNA, 99 bp, Homo sapiens
ctggacctatgaatatccagtttgagccatcggatctaagatccaaaagagggaagtgatgagctttcctttgatccggacgacgtaatcactgacatt

SEQ ID NO: 881729 - DNA, 98 bp, Homo sapiens
ttcaagaagtggccggagagttctgcatgttgattcttgtatatgaacacagatcaagattagagaaatccttgcaaaaagaaagacttgaacataaa

SEQ ID NO: 881730 - DNA, 99 bp, Homo sapiens
gcagcgaactgggtggcgaacggggcgagcctggaggattgtcactccaacctcttttcgctggataagttctgaacgtcgaaaagaaaagtctcgaga

SEQ ID NO: 881731 - DNA, 99 bp, Homo sapiens
tgtcagccaggtgtagaaggtgtgaatcccatgacacagatggctgcggctctgcattcaatccaagtgggaggacgcaattcctttggcgctaaagat

SEQ ID NO: 881732 - DNA, 99 bp, Homo sapiens
ctgcgggtgcgcaaggcgtccaggagtgacctggggctgtggagagcgacccgtggccttgtgtttcaggttacaagaacagccaatcgtccaatagcc

SEQ ID NO: 881733 - DNA, 98 bp, Homo sapiens
gatggtcctcaaagggaagatcagaccagactcatcgaggcctgaattgctccagcctaaatgttccgaataacgttacttcaagtcctacatccaac

SEQ ID NO: 881734 - DNA, 99 bp, Homo sapiens
ggaaggttcaaaatgtgttatcatgatatcccattggcagtgcattgatgtggggatgtgcaactgaatatccggtcaccgccaatcacaagttgctgt

SEQ ID NO: 881735 - DNA, 99 bp, Homo sapiens
ctttgatttctgccagcatgtgactgaagataagggacagttttgtgagatttcgtctgtagcaccagcggctcggggttgaaggccagggtcagcagc

SEQ ID NO: 881736 - DNA, 99 bp, Homo sapiens
ccatccatcgcataagagcaaagaacactgttgttgccacaggatggaatcgccacttatatatgtttcagttttgcttttgaacatatttgaattttc

SEQ ID NO: 881737 - DNA, 98 bp, Homo sapiens
aacttactcatcacgtctctatagtgtcttctggttacctgtcctgctgccgattcctggatgacaatcagatcgtcaccagctctggagacaccacg

SEQ ID NO: 881738 - DNA, 99 bp, Homo sapiens
caacgaaggcttctgcccgtgcctggagtctggaattcagaacgtcagcacctgcaggttcaggaatgatgaaaggtggaaacaaacaagaagaagcgt

SEQ ID NO: 881739 - DNA, 98 bp, Homo sapiens
gggcgtctgggcagcctacgctttccggtgacagagctgaatgaacctctctccaatgaagatcgaaatctcctctctgtggcctacaagaatgtggt

SEQ ID NO: 881740 - DNA, 98 bp, Homo sapiens
agttctgtcactcacttacacagtattgggaaatctgtgaaaggctaagtgctatttatggaggtacctatatgctgaataaacccattgaagaaatc

SEQ ID NO: 881741 - DNA, 100 bp, Homo sapiens
ggtgatttctgcatttccatctgaggttaacaattcatgctgagtgtcccatgcatttggaagattttcccatggatgtgcatgcctgcccactgaagtt

SEQ ID NO: 881742 - DNA, 99 bp, Homo sapiens
aatttgtcgatatcacagccaccaaccacactaacgagattcaagattatttgcaacagctcacgggagcaagaacgtcgttgctgctcctagcttacc

SEQ ID NO: 881743 - DNA, 99 bp, Homo sapiens
ggaaagagagtatggctgtccttgtatcacaggaaagccaaaagttgcctttcgagagaccattactgcccctgtccccaaagaaatgatgactttatt

SEQ ID NO: 881744 - DNA, 99 bp, Homo sapiens
taaaccattcatgcttcccagtttggcagatgtgagcaaactatgtataggaattccaaagatagcagaagactgctgcctgacgattgtgggcagcct

SEQ ID NO: 881745 - DNA, 99 bp, Homo sapiens
aaggctgaaccggcacttccatgacctctggaagtttaatcctgggttatgtaccgaaggactctaccgtgtcagcgggaataaaactgaccaagacaa

SEQ ID NO: 881746 - DNA, 99 bp, Homo sapiens
gtcaccacatcatccttgttgcctacagcaatggtctgcccatcaggactccagcagatattaatgttctccccattcctgtcgagctgcagtctccat

SEQ ID NO: 881747 - DNA, 99 bp, Homo sapiens
aatgggctgtgggctgaggaagagatttggagcaagaggtggtggtggccttcccccgaagaaatttggtaatcctggggagcgtttgcgtaaaaaaaa

SEQ ID NO: 881748 - DNA, 99 bp, Homo sapiens
gtacccattcccaagtcccacgaggcggttatggtggagaattcagactttaccccctcacaagtaggatgtctctttaccttccttgctcggcagctt

SEQ ID NO: 881749 - DNA, 99 bp, Homo sapiens
aatgctgcgcatgcaggagggagaggggcattctcaactctgcctggacaggctgcagctggaggctattcataaggattatcctgatgcccttatcac

SEQ ID NO: 881750 - DNA, 98 bp, Homo sapiens
ttctcaatacgaggcgcaaggtggactggctgactgagaagatgcatgccagagacttcacagtttctgctctgtggtggacttgctttgtgaagaga

SEQ ID NO: 881751 - DNA, 99 bp, Homo sapiens
ttaatttcatggtacatgagtggctatcatactggctattatatggaataaagggattcattcctcattttaactgatgttacagtgaagatgggttct

SEQ ID NO: 881752 - DNA, 99 bp, Homo sapiens
tgaacgaattctcaacccctacaacttattcctgtccggagacagcctaaggtttgacaacttaaatgctgcgcatgaaacctctaagttggaaattga

SEQ ID NO: 881753 - DNA, 99 bp, Homo sapiens
tacatggtgatgaattttgtcctgttttggatgcaacatttgtaatggtggctcgtgattctgaaaataaaggagtttcgctcttgttgcccaggctgg

SEQ ID NO: 881754 - DNA, 99 bp, Homo sapiens
caggcccagagccggcatgaactctcccaacgagtcggtttccagaaccacaagacagacccaagagggctgtgttggcaaaacaaatggcagagtgga

SEQ ID NO: 881755 - DNA, 99 bp, Homo sapiens
tatatgaatggtggttcagatggaggttagaccgttattttggggggaaagagctcagagatgaggaacagacagctgagagcattaagaaccaaatga

SEQ ID NO: 881756 - DNA, 99 bp, Homo sapiens
caatttctagctttgtaggagcatggcttggagcacttcctattccactggattgggaaagaccatggcaggtcagtcttccacctccactaccggtgc

SEQ ID NO: 881757 - DNA, 99 bp, Homo sapiens
cagcctcccgagtagctgggattatagaactaagttcagaaaatcttagaacttgctttaagatcatcaatggttatatctttttatcatcaacagaat

SEQ ID NO: 881758 - DNA, 99 bp, Homo sapiens
tcaaatcagaaaactatgggaagattttggtagagaagaatgaacattgtattgagaacaatatagatttgcaggagtacatcgatgcccaccctgaga

SEQ ID NO: 881759 - DNA, 99 bp, Homo sapiens
accagtgaattccacgaacatgagcccactgctgcacttctatggccgtaaaaaaccaccatcatgggttcgggtcccatagaccccaaagaacttctc

SEQ ID NO: 881760 - DNA, 99 bp, Homo sapiens
aacggcggtacccgggtggttaaacttcgcaaaatggagaactgtgtttatgaaactgtagttttgcctttggatgaaagggcatttgagaagacttta

SEQ ID NO: 881761 - DNA, 99 bp, Homo sapiens
tccatgtgctggcagcacttccctgagccactctccaggctgctccagtactcaagggaacgggggcctttacaacaactaaacggacaggcattccag

SEQ ID NO: 881762 - DNA, 99 bp, Homo sapiens
caggcagatgagcagccctttgatctctgctttgggggccgaaggcagttctgcaagaggagctattctgatcttgacacagcaggatgccaatgcctc

SEQ ID NO: 881763 - DNA, 99 bp, Homo sapiens
gaattagattttctgctttaactgccgcctcacctgtggagctctgggtacaggtttacccaaggtccagcctagcccctaggcaccatgtcggacagt

SEQ ID NO: 881764 - DNA, 98 bp, Homo sapiens
cagaattcaattaaagtggctcaggtgcatgaatacctcagaagtaaactctgttcactgtatgaaaatgactgcatatttgacaaatttgaatgttg

SEQ ID NO: 881765 - DNA, 99 bp, Homo sapiens
cctgtctggagcaaggaaaagatccctggaatatgaagagacacagtatggtagccacacccccagcatggcacattacacttctgtggatttaaagtc

SEQ ID NO: 881766 - DNA, 99 bp, Homo sapiens
gaacatcgaaaggaccaagtaacacagctttcacaagagattgagaggatccagaatccagatctctggaatagctaccaggcaaagaaaaaaactatg

SEQ ID NO: 881767 - DNA, 99 bp, Homo sapiens
ctggctctgcgtccagcccgggcctgagcacagcttcgccattaaagacatggcactttgggtccgggtccaggtcctggttcagagcagctgccacac

SEQ ID NO: 881768 - DNA, 98 bp, Homo sapiens
aaaacaaaaactgatgaccaagagaatgtgtcagccgatgcaccgagtccagcccaggaaaatggagagtgaactggcagcatcattccgtccctgtg

SEQ ID NO: 881769 - DNA, 99 bp, Homo sapiens
gaaacgtgtttcaagaccaaaaaacacaataccaggcatacatttggcagaataaatgaaccagacttcacatgtatcattctccgagcctgatattcc

SEQ ID NO: 881770 - DNA, 99 bp, Homo sapiens
cagatgttcctggggttactgtaaatgggaaggacaggcagagctaaacaagttgctgcagcaaacgagattgctaaggaaaggaggaagcaagatgtg

SEQ ID NO: 881771 - DNA, 98 bp, Homo sapiens
gaagatataacaagatcagcaaatctaactgaccaggtgaaaggtgtagcagtcactcggcctacacccacagcatcgaccttgtgaacccagcgacc

SEQ ID NO: 881772 - DNA, 99 bp, Homo sapiens
ttctctgaagcctggaaacgaggcactcagttggaagagtccagcaagaaacatgcccctgattcagtgcctctgcttagctgtaacatgttaatcaga

SEQ ID NO: 881773 - DNA, 130 bp, Homo sapiens
ggagcgggagcggccggaggagccatggactgcagcctcgtgcggacgctcgtgcacagataccctcatgtttgactgttggagatttatcctgtgcaagagacctggaagcaacagttattcttcccca

SEQ ID NO: 881774 - DNA, 99 bp, Homo sapiens
tcgaggagagccggagtcggggacccaggagtttcctgtgtccagcgctgccggagccgcctgagatctgggcacgaaagcttctctctgtcccttggc

SEQ ID NO: 881775 - DNA, 99 bp, Homo sapiens
tgccagctttcatcctgagttgccaatcattatcacaggttcagaagatgcctctactcttcatggatcttttggatgaaagaacactcgtggcagtag

SEQ ID NO: 881776 - DNA, 99 bp, Homo sapiens
ggatgaagcaccgaacaaactggagcccgcaaggaagttgccttaaagaatagacaagagctgtatgcactacctcctcctccccagttctactcaagc

SEQ ID NO: 881777 - DNA, 99 bp, Homo sapiens
ccccaggctggagtgcaatgtttgggatatgagattgaaaatgacgactcggaattttcctgagagagaagtaccctgtgatgtagaagtggaaagatt

SEQ ID NO: 881778 - DNA, 99 bp, Homo sapiens
ttccggcggccgaagacactgcgactccggagacagcccaaatatcctcggaagagcgctcccaggagaaacaaggcctgtgaactcggagctgttcct

SEQ ID NO: 881779 - DNA, 99 bp, Homo sapiens
ggaggaagaggaagatgatggagatttgcctgtgtggaagatagatgataagcctgtaaaaattgacaagtgggatggatcagctgtgaaaaactcttt

SEQ ID NO: 881780 - DNA, 99 bp, Homo sapiens
atgccaaggaaaaactggagagcttcatcaaaaatagtgatagctttgataagctgaccggttccctgatgtgttacctgcttctgctactgatccaaa

SEQ ID NO: 881781 - DNA, 99 bp, Homo sapiens
ctgccttgtaccagttctgatcacattcttcgttcaaaaccaccatccctctctctaactctgtgagtatgcacatttttggccttactgtgacctgtg

SEQ ID NO: 881782 - DNA, 99 bp, Homo sapiens
cagtcacaagacctggagttgtctgtgcagatgtacgcccaagccgccctggatggagactcccaggacctggcctgggccgtcagctactacatccgg

SEQ ID NO: 881783 - DNA, 98 bp, Homo sapiens
tccaatttcctcttcaacccactgcttcctgactcgctctactccgtggaagcacgctcacaaagatgagtcagatgaagccccatgtgtatgatctg

SEQ ID NO: 881784 - DNA, 99 bp, Homo sapiens
ggcttgagctgagagagcctgtgccaagctgtggggctccgagtcagcagcagcatggatctgatgctccttctaacgatgacgatattcgcgctctcg

SEQ ID NO: 881785 - DNA, 100 bp, Homo sapiens
acgacttgcttttgtatcaggacgaggaggcgcttcgctgatgcgctcagaaataatggagtcgttcagcgcctcctcgtcctgatacaaaagcaagtcg

SEQ ID NO: 881786 - DNA, 99 bp, Homo sapiens
ctgctgctctctcatttgctggccatcggattggggcaggtccgatcagaaaacaaagaaaagagtgcagtgatgtcatttacagttaccgatgaacct

SEQ ID NO: 881787 - DNA, 99 bp, Homo sapiens
ggcacactgtccccgaagggtacacattcgggtgaaataatggtggttcgaatttacccgcagggcaatcttcatcttgatggtgctgtttggacccga

SEQ ID NO: 881788 - DNA, 99 bp, Homo sapiens
gaagatgagctgtcctttcaggaaggagccattatttatgtcatcaagaagaatgacgatggatggtgctgctccactggtgcctgctgtggctcctgt

SEQ ID NO: 881789 - DNA, 99 bp, Homo sapiens
tccagtgataccaaacagcattgttagcagctataatcaaacaagttctgaagcagtgggcaagttacggaagcaatggctaaaggaaagtatctctga

SEQ ID NO: 881790 - DNA, 99 bp, Homo sapiens
tccggcttcggagcgggagtgttcgttgtgccagcgactaaaaagaggacatgtcctcatagagatttcaagtacccacaagaaactcaacgagagtct

SEQ ID NO: 881791 - DNA, 99 bp, Homo sapiens
catcctttcagagggctctctgcaggaaggacaccgattatggattggcaacctggaccccaaaattaccgagctacgtttgcgagaggaaggatttgc

SEQ ID NO: 881792 - DNA, 99 bp, Homo sapiens
tgtcagcagcaattcagactagttccctgggacttttgactggttatatccgaagatggataacagaaggactaagagcctctggaaaggactcagccc

SEQ ID NO: 881793 - DNA, 99 bp, Homo sapiens
cttctctgaggcggcgagagatggtcaggtctggagctcgaccgggccagagtcaagggtccagagaaggaggagaagttgagacaggcggtcaagcag

SEQ ID NO: 881794 - DNA, 140 bp, Homo sapiens
ccattcctgttgtgggtcccatcagctgtagccagtgtatgaagcccttcaccaacaaagatgcctatacttgtgcaactacgtgtggattgtgcccatcacatccatcagagatggcagacagcagcaggactactggc

SEQ ID NO: 881795 - DNA, 99 bp, Homo sapiens
gagaagtttttacaaagaacatgctcacatcttcaggtgcctcattcacatacgtcaaggaaattgagaatctccctggaaaaggagacatgaatgtct

SEQ ID NO: 881796 - DNA, 99 bp, Homo sapiens
cagaaaatatcatcttagcagctccataatagttctgtaactaccatgctgctcatattagagttcggactactgagaacactgcctgagagtagttcg

SEQ ID NO: 881797 - DNA, 99 bp, Homo sapiens
tcaggatttcttaaaggatagccaattgcagtttgaggctgtgagccgtctcctgattttgggaggggccaacgtgaactacaggacagaagtgttaaa

SEQ ID NO: 881798 - DNA, 98 bp, Homo sapiens
tggacgacacctggttgcaggtgcagagcatccctgacgcacacagttaaaagcatattggcagaggaagagccctggcattccagcaggagctaaca

SEQ ID NO: 881799 - DNA, 98 bp, Homo sapiens
ctagggcggcggcgccagcgtagagcggcggtttggaggaaagatgagacgtagccggatcgagctgggagatgtgacaccacacaatattaaacagt

SEQ ID NO: 881800 - DNA, 99 bp, Homo sapiens
gctgcagtgacatgtccagcatgaatcccgaatacctaaattatacagatctgtgattgaagatgtcattaatgatgtgagagacatctttctggatga

SEQ ID NO: 881801 - DNA, 99 bp, Homo sapiens
agaaaccacagagtacttaaaaacatcatggatcaatctcaaacaaagatacagtttatgtaacttgatggaagaaaatggaattactccaaaaagaca

SEQ ID NO: 881802 - DNA, 99 bp, Homo sapiens
gtcatactcacagaaaagaaaggctggggcttgagagctgccaaagaccttccttcgcatatcacacctgaaaaattttatgtggaagcttgtgatgat

SEQ ID NO: 881803 - DNA, 99 bp, Homo sapiens
gcaccctggtgcccagccgggaactccccatcgcgttttgccagcgataatacgcctcagatgttcttggcagccctgtcattcagctatattgctaaa

SEQ ID NO: 881804 - DNA, 99 bp, Homo sapiens
gatggggaaccctgccctctctgtcagacacctgtccttccttctacagaccatgctggacttcttgtcggatcagggactcgctcagcagcagcctga

SEQ ID NO: 881805 - DNA, 99 bp, Homo sapiens
tggattgtgagctatttcagaactgttctcaggactcattattttaacatttgggagaaacacagccagaagatcactttggaggactatgagcaggca

SEQ ID NO: 881806 - DNA, 98 bp, Homo sapiens
tcaccagccgacacctgctgagtcttatcgaatgttacttagcctccaacagtattcgagaagcaatggtaatggctaacaacgtttacaaaactctg

SEQ ID NO: 881807 - DNA, 99 bp, Homo sapiens
tggtcatcgcgggggcgtctgatcctagcgctccaccgccagatcccctcagccttggtgctactatttttcccgtctgtccaacttgcatgtcattgg

SEQ ID NO: 881808 - DNA, 99 bp, Homo sapiens
actctctcccttaagcactgggatcaggtttctaagcatgaattgaggaacagaagaagcagagcagatgatcggagcagcatttgtttctccccaaat

SEQ ID NO: 881809 - DNA, 98 bp, Homo sapiens
ggaggagaaaggcaggagagatagaggcagcagaagccagggcagctgaaagacagagaccttcagatattcctatcattccggatctggaggaagta

SEQ ID NO: 881810 - DNA, 99 bp, Homo sapiens
ggaagtggttggaaatggcacctatggacaagtctataaggtatggcatttcaaatatagatacaaccattgaaggaacgtcagatgacctgactgttg

SEQ ID NO: 881811 - DNA, 102 bp, Homo sapiens
gtggaaactcaccaaaatggatgggaactggaggcggggctccaccgcgggcctcccgcggtggagccccgcctccagttcccatccattttggtgagtttc

SEQ ID NO: 881812 - DNA, 99 bp, Homo sapiens
cctacagatccctgagctgagcccacactctgccaagcagctggccactgacatcgacaaagccacagacccaagcatgtcggaacaggattggtcagc

SEQ ID NO: 881813 - DNA, 98 bp, Homo sapiens
ccaagtctcctgaagaggaaggagcggtgtcctcttaagaaaatggagcacagggatcagttgtccttgtttttttttggtcttttcttcatttgaag

SEQ ID NO: 881814 - DNA, 99 bp, Homo sapiens
tgaattctgccaaagagaaatataaagaagctttagctaaagctgatacgcctcctcctgcctatatgccacctgatgatcagatgggtcaagataatt

SEQ ID NO: 881815 - DNA, 99 bp, Homo sapiens
caggatagcctgaagaaacatctacacgcagaaatcaaagttattggggacatcggcagaaactagatgatcagaccaagcccgggagcttgtcctttt

SEQ ID NO: 881816 - DNA, 99 bp, Homo sapiens
gggcttcctggccctctaccaaaccgtggatcagtacttgatatttggtgccgaagaagggatttataccctcaatcttaatgaacttcatgaaacatc

SEQ ID NO: 881817 - DNA, 99 bp, Homo sapiens
gcaggagtcgtactttgggagaactagaatctctggatggagagcaatacatcatcatctttggagaatttagcgacggcgcctgtgaaccagatccaa

SEQ ID NO: 881818 - DNA, 99 bp, Homo sapiens
aggagacctgggcacggagcagccagtgccagatcttagacgaattttacaatgtgaagttctgcatagatgccagtcaaccagatgttggaagctggc

SEQ ID NO: 881819 - DNA, 99 bp, Homo sapiens
attgatataatgaagactagttttccagagcctcagcttaagggtatagttaccaagctatacagccgacaaggctaccacttgcagctgcaggcggat

SEQ ID NO: 881820 - DNA, 99 bp, Homo sapiens
cagccctgggcctgtgactatcagctctttcaagtccttcctggggaccgggctcttccgccctctctggatgagggaacagaagtggaggaaacaaaa

SEQ ID NO: 881821 - DNA, 99 bp, Homo sapiens
ctcttcttggtgtctgtatggttgctgatcccatgcgaggcccaagaaaactagaagtagtggaggtcaaatctcggcaaatcactatccgctgggagc

SEQ ID NO: 881822 - DNA, 99 bp, Homo sapiens
cggagaacaagactgcccacctccacaagggcttcctggccctctaccaaaccgtggaacctcaagaaggcatgaagccagcccctgcagtgccgtcca

SEQ ID NO: 881823 - DNA, 99 bp, Homo sapiens
cagctctagaaagggtgtggccgttttacattggctgttttcctcacattcctcaagcaggtgggaatggaagtggccccacatctcaaagaaacccta

SEQ ID NO: 881824 - DNA, 99 bp, Homo sapiens
gggatggatgggagcagctgacaggccaatagcccttcattgctggttactgcagtctgaaccagaggctgactctctccgcttggattctgagcatag

SEQ ID NO: 881825 - DNA, 99 bp, Homo sapiens
agaccatgggacccccctcagcccctccctgcagattgcatgtcccctggaaggaggtcctgctcacagctctagaggacaaaatcccagtccttggca

SEQ ID NO: 881826 - DNA, 99 bp, Homo sapiens
ctagggctccggcgcgtcacgggcctcagctgggattcccgcgcccctcggacggccacgagactcgggttccagcaacagatagaaatgctttaagtt

SEQ ID NO: 881827 - DNA, 100 bp, Homo sapiens
ggcctcccgaagtgctgggattacagagtgtgacaagtttaaccaatgtgggacatgcaatgaattcaaagagtgccacgccatccggaactacaccctc

SEQ ID NO: 881828 - DNA, 99 bp, Homo sapiens
ctccctctcatgcggcgttggctagggctgggttgcagcactcttcccatcattatcctcttcaccttgtcttgccctttttgccaaatgttcatcttc

SEQ ID NO: 881829 - DNA, 99 bp, Homo sapiens
actggaagatctgagatctaaagctaaaattgcctttggacagtctatggatctacattataccaataacgagcactatgagatgcttgctaatcgaac

SEQ ID NO: 881830 - DNA, 99 bp, Homo sapiens
aaactgttggagtttatatacacaggaactttaaatcttgacaggtgaagcaaaaaatttattgccatatcttggaccccacaaaatgagagattgttt

SEQ ID NO: 881831 - DNA, 99 bp, Homo sapiens
cagaagctggtatttggccaaggaaccaggctgactatcaacccaaacaagttggatggcttgaggactggtactaaaaggaaacgtgactgggaggcc

SEQ ID NO: 881832 - DNA, 118 bp, Homo sapiens
acatccccaccccacaggatctgccccagagaaagtcctcgctcgtcaccagcaagcttgcgggcttgtacctccttttaaacctcaagtaacatctgagacagatactagatatttt

SEQ ID NO: 881833 - DNA, 98 bp, Homo sapiens
catagccttcacagagagtccagttgccaagatgctgggctcttgcactgtttggtggaaatggtgagacaggatttgagcaaaattctacttattca

SEQ ID NO: 881834 - DNA, 99 bp, Homo sapiens
ttcttgaaaaatgcaaagatgtagatgagagaaatgaggattgcaagtcaagtagctgctttggaccttggctataagcctggggtggaagcaattcgg

SEQ ID NO: 881835 - DNA, 99 bp, Homo sapiens
tttgcaccctgcttggagacggacttgcttccgagatctgaaactggacaatgtcctgttggaccacgagggtcactgtaaactggcagacttcggaat

SEQ ID NO: 881836 - DNA, 99 bp, Homo sapiens
gtttcctaccaggtcacacactgttgcagcgcagggccttcgtgtacctgagcaacctgctgtaccccgttcccctggtacaccgtgtggcaatcgtca

SEQ ID NO: 881837 - DNA, 99 bp, Homo sapiens
gccgccgaagaagcatcgttaaagtctctcttcaccctgccgtcatgtctaagtcagaggacagagcgggatgccaccagcttgtccaaagggaagttc

SEQ ID NO: 881838 - DNA, 99 bp, Homo sapiens
atgatggaatgcttgacagagatgagtttgcagttgtcgacaaagatgctgaattagtggcccaatggaactattgtactctaagtcaggaaatattaa

SEQ ID NO: 881839 - DNA, 98 bp, Homo sapiens
gacaaccaggcaatgctggatagataccgaattcttatcacaaagatttgggccaggcttagtcatctattggtatggatttatccaggagctggact

SEQ ID NO: 881840 - DNA, 126 bp, Homo sapiens
ctggagcgggtgctgcaggcgccgccgccggacgtcggcaacggagaaggaatccagacagacagcgtgctctctgcaaggcttcagataataagaatctacattcgagaggatggccgtcttgtc

SEQ ID NO: 881841 - DNA, 99 bp, Homo sapiens
gcttaaggaattcctggaaacatcaggaaaacatttgatcatccaagcctagtggaaatggctttaccgcagaacagatttgaccagttttgggccatc

SEQ ID NO: 881842 - DNA, 99 bp, Homo sapiens
atccaatcctctgcttccaggacaagtcctgcgcttggggatcctctgtacgcccgttcactgatggcttgttcaatcagtatatcagtcaacaggaat

SEQ ID NO: 881843 - DNA, 99 bp, Homo sapiens
tgttctgggagcacacccgttctctcggctggatgttctcatcgtccctgccaactttccaagtctggggatggccagtgagaaagatcagtctaaaga

SEQ ID NO: 881844 - DNA, 99 bp, Homo sapiens
attgtgatgagcgtgttctggggcttcgtcggcttcttggtgccttggttcatccctaagggtcctaaccgggggtttatggctacaaatgatttgatg

SEQ ID NO: 881845 - DNA, 98 bp, Homo sapiens
ttcatgtgtctcttctaagctgaataaagctgttttggaactgtcaggtacctcaaagccattttgaaagcgaagcagaagccgtagaatcagcggcg

SEQ ID NO: 881846 - DNA, 99 bp, Homo sapiens
atgcagactgtttatctcagggaaatatcaagatgggcactctggttttttaaaaatgataaaagcaaaacttggcaagcaaacctgcggctgatctcc

SEQ ID NO: 881847 - DNA, 99 bp, Homo sapiens
gacgaacgtgttgtgcctgctgaggatggccggaggctcgccgacgaccttggctcccagccccattgccaataccttcctccactatcgaaccagcaa

SEQ ID NO: 881848 - DNA, 99 bp, Homo sapiens
ctcccgagtagctggaattacagaaattacagaagacatccccgtgaagactttgaatatgaagactgtgtatgtttctgtgttaccaacaacagcaga

SEQ ID NO: 881849 - DNA, 99 bp, Homo sapiens
gaccaagaactgaccgaacatgaacatcagcagatgagagacgacttggagaaagagagggatggttcaacaatgctcattgaagctgcaaagggtggc

SEQ ID NO: 881850 - DNA, 102 bp, Homo sapiens
ttccagatgagcacctcattctaaagaccacatttgaggatcttattcagcgctgccgaataagatcctcaaatgtggtctttagaatgaggtgctcatctg

SEQ ID NO: 881851 - DNA, 99 bp, Homo sapiens
ctgggcgacagggcgagactcaggacatagagcaggatgtagaggtggtgggtcagccagaagccccggaaactgcggcggcggaagtggtgggaggca

SEQ ID NO: 881852 - DNA, 98 bp, Homo sapiens
cacctcctcgccagcagccgtccggagccagccaacgagcgagctccttaataagcatttatagtcagtttttggcagcaatagaatcactaaaggca

SEQ ID NO: 881853 - DNA, 99 bp, Homo sapiens
tcgactggcagtacctacagaatgctgccaagctcttggccaaggcaaggcatctttacatatgtgattatcataaaaacttaattcagagtgttcgaa

SEQ ID NO: 881854 - DNA, 99 bp, Homo sapiens
acagttcgaggggccaaggcagaagaaatcttggagaagggtctaaaggttattgttgtgggtaatccagccaataccaactgcctgactgcttccaag

SEQ ID NO: 881855 - DNA, 112 bp, Homo sapiens
aacgcgagtgggagcaccaggatctcgggctcggaacgagactgcacgatgtgtatatctcatgattgatatggagaaactagtcatgggccaaaggtcaagatacttctct

SEQ ID NO: 881856 - DNA, 98 bp, Homo sapiens
acaggggaagcacaaaccacaggcaagaagccagcacccaaggggcagggtcgttccaggggtagaggaggcatgaaggatgaccgtcgggacagata

SEQ ID NO: 881857 - DNA, 98 bp, Homo sapiens
gggtgggagtgacccgattttccagaggcggggtttcaccatgttgcccagactggtcttgaactcctgagcttaagcaatccacctgcctcggcctc

SEQ ID NO: 881858 - DNA, 99 bp, Homo sapiens
tggtacacccgggagagtgtttgatatgttaaacagaagatacctttgcagcaattccatttccgtgagggcgtttctagatgaagatgacatgagctt

SEQ ID NO: 881859 - DNA, 99 bp, Homo sapiens
gcctgggcgacagagtaagactccatctctaataggccatcctctggcagatcagtacagtgaacagcattctggatcttagttttaccaaagattgct

SEQ ID NO: 881860 - DNA, 99 bp, Homo sapiens
ttaaggaacaaagtgcttaaagaagatgtgctgattgcagccttactatttgaaacatccctcacattgaaatatggaactgttgacattcagggatgt

SEQ ID NO: 881861 - DNA, 98 bp, Homo sapiens
agaagggagagcgcccggctcggtcctcggtctccaccgcggcccggaaggaatccgggcagcctccgcggaggtaactaaatgaccatggaatctgg

SEQ ID NO: 881862 - DNA, 99 bp, Homo sapiens
ggcgccgggcctcccagccgacatgtctctagtggcggaagccttcgtctcccagattgcagtttgtgaagtgtggatatgcaggctctaactttccag

SEQ ID NO: 881863 - DNA, 99 bp, Homo sapiens
cctgaggtggatcaccagctgaaggagcggtttgcaaacatgaaggaagagtcttaccaaagtcaggacagttcaaataacaatccggagttatgcgtc

SEQ ID NO: 881864 - DNA, 99 bp, Homo sapiens
ttggatctctggcggggtgcagaactgagcccaggccacagtaccctattcacgctctgtgcttgtgccaaggaaatcatcgagttccccatcctaaag

SEQ ID NO: 881865 - DNA, 99 bp, Homo sapiens
ctgcctcccaggtacaggtttcgagatttgctgctaggggaccaaggatggcaaaacgacgacagacccaacatgagtgaagtttcctgcaagaaacgg

SEQ ID NO: 881866 - DNA, 99 bp, Homo sapiens
ttccctttccacctccctgaccctgtcggattcggatgagcccattgcaaggagaagacgcagccgtcagaatcccaaggactgcagcaaagccaaaaa

SEQ ID NO: 881867 - DNA, 99 bp, Homo sapiens
gcaaggttggcattcctcaggagaatgcagaccatgatgactttgatgctaatcaactattgaacaagatcaatgttgaggagctcaagcttgggaaaa

SEQ ID NO: 881868 - DNA, 99 bp, Homo sapiens
aaaaagaaggccctgagtcaaagaagatgcctcgaactaaacaaattcatcccagaaatctaagaggttgattcttcaccacactgaaaccattaggaa

SEQ ID NO: 881869 - DNA, 99 bp, Homo sapiens
cttcattgctccttcaggacatgggaagggtagatgtctacccaaatggaatattgagtatcagagacttcaaatgataacttttgtttgtttggagaa

SEQ ID NO: 881870 - DNA, 98 bp, Homo sapiens
ggagaagtacgagcggatccgagtggtggggagaggtgccttcggcttctgggttcatgagtcttgacaacaacggtactgctaccccagagttacct

SEQ ID NO: 881871 - DNA, 98 bp, Homo sapiens
gcagcacctacagagcggtgattttcgacatgggcggagttctcattccttctccagggagagtcgctgcagcaatctgcacatcgtgctgccacacg

SEQ ID NO: 881872 - DNA, 99 bp, Homo sapiens
ctgaatctgtcaccttgcaacagtactaccgagaagcaatgattcaggggtacaattttggatttgagaaatgacagactttttcattgaatgatgagg

SEQ ID NO: 881873 - DNA, 99 bp, Homo sapiens
catcggccatacttcctgaaaaaatgtgggtgaattttctggagccaataaggaaaagcttgaagccaccattaatgaattagtctaatcatgttttct

SEQ ID NO: 881874 - DNA, 99 bp, Homo sapiens
ccaagaagcgaaatgtgctcattggccattcctacggtccaaaagaaactcttccttcaaaacctgtgaagaaagagaaggaacagaggacacgtcact

SEQ ID NO: 881875 - DNA, 98 bp, Homo sapiens
gaaaacctccagatttttacccaactgcagaagttgaacaagaaattagaaggagggcagcaggtctggatattgagagcagcttgaagcagttggct

SEQ ID NO: 881876 - DNA, 99 bp, Homo sapiens
acccaaggatctggaaagcatcatcagacccaagtgccaagttatttactttcccatcaggtttcctgatgtgagcagaaagatgtgcgggacatcctc

SEQ ID NO: 881877 - DNA, 99 bp, Homo sapiens
gtctacaatggagtcgagtctagaattcacacagagccacctaggaccaggagctgcattatctattctagacaaatttcttgaagaatcctccaaact

SEQ ID NO: 881878 - DNA, 98 bp, Homo sapiens
ccgttggctccagacaaataaacatggagtccatcttccacgagaaagaagaacttcagatgtcacttttaaaattgaacaatgaatatgaagtaatt

SEQ ID NO: 881879 - DNA, 99 bp, Homo sapiens
tttttgggacttgccagtttctttgctgggatggctgtcctttctggaccacctatagcaggtcctgaccactggcatgaacttttcccaaatgccaag

SEQ ID NO: 881880 - DNA, 98 bp, Homo sapiens
aagaattcacaggcaggtcccctgaaactgggtcggcaggacggtggtggagcccgagagagggggggccctcagcctcttggccttgaacgggctgt

SEQ ID NO: 881881 - DNA, 98 bp, Homo sapiens
ggggctaaccagttagtggtgctcaacgtgtacgacatgtgctgaagctgctgaaagatggcagaagaagtggtggtagtagccaaatttgattatgt

SEQ ID NO: 881882 - DNA, 98 bp, Homo sapiens
gcacacatggttaaggaacaggaggaaaccattcagagggcaagtgtccagagaatggctgggatgaaagtacacttgaactctttttacatgaactt

SEQ ID NO: 881883 - DNA, 99 bp, Homo sapiens
ctttgatgaaactagaaagaccacgaacttcaaaggggaaagcaaggccaaagacagggagaaggtagtgggcagcagtcagtgacaggtgtaacctct

SEQ ID NO: 881884 - DNA, 99 bp, Homo sapiens
tcctccagaaactttggcgacaatgttggcctgtctgcaagcttgtgcaggctcagaccatgaccgacttcataccttggtaactgaacactgttttcc

SEQ ID NO: 881885 - DNA, 99 bp, Homo sapiens
ccggcctctcggcctctgccggagaaacagtacgaggatgtcgtccaggaaagattgtgcagatgactgaagcagaagttcgaggcttatgtatcaagt

SEQ ID NO: 881886 - DNA, 98 bp, Homo sapiens
tgggagaatgctcttcaattcctgacaaaattatgggcagactgtttgctgacgaaggacctagaagaatcccttaggatgaagctgagtcttaccaa

SEQ ID NO: 881887 - DNA, 99 bp, Homo sapiens
aaactaatgagggatgccaaaatctatcaggcctactgaacttgacgcactggtatttggccatctatacaccattcttaccacacaattgacaaatga

SEQ ID NO: 881888 - DNA, 99 bp, Homo sapiens
attgatgaagctttgcgaagaaggttagaaaaaaggatatatatacctctcccaacagcttaagagttggacagtggaggaccttcagaagaggctctt

SEQ ID NO: 881889 - DNA, 99 bp, Homo sapiens
ggttttagcaaaaggagcccggaggaacattccaaaggaaaaatttcaggcagtacatgccacactactacccttcctgctcttgtgcgcacacctacc

SEQ ID NO: 881890 - DNA, 99 bp, Homo sapiens
aaaaacccagctgaagaccactttagaaactcaattaatgaaggcattggagtctttcagcaatcttctaaacaaagtctgtttgattcatgtaagatg

SEQ ID NO: 881891 - DNA, 99 bp, Homo sapiens
gccggactcgtgcgagccttcctgtggtgaggtcaaccaaccagacgaaagaaagatctctggagcagtacacagtgaccgggctgatggaagcgaccc

SEQ ID NO: 881892 - DNA, 99 bp, Homo sapiens
gaaaggattcgttacagccagagattgatggcgtgatcaacatgagcatccccattgtactgcccgtctctgcagaggataagacacggctggaagggt

SEQ ID NO: 881893 - DNA, 99 bp, Homo sapiens
ggaacaggcttcggcgaacacaaaggtgaatcaggtctaggaaaatcgactctcataaacagcctattcctaactgatctgtacccagaaagagtcata

SEQ ID NO: 881894 - DNA, 99 bp, Homo sapiens
tccggcagctggagatgtccgagcccaaggcaattgatcccaagttgtcgacgaccgacagggtggtgaaagtgctgtccccggcataggtccatctct

SEQ ID NO: 881895 - DNA, 99 bp, Homo sapiens
aggccaacttaacatcagcagatatcctgtctcagatgaagaggttcgtgacaataaaaaattaagagtaaatgctgttattgctcccaagagttcata

SEQ ID NO: 881896 - DNA, 99 bp, Homo sapiens
cctctatatccgaggactgcctccccacaccaccgaccaggacctggtgaagctctgtcaaccgtatacaaaactaggatatgctggaaatacagaacc

SEQ ID NO: 881897 - DNA, 99 bp, Homo sapiens
cgagagcgcgaatatcgtcatcgttagaagattcctataactttaggtgtaatcctaaattcttattacgatgtgaagtttaatttccttggaatggtg

SEQ ID NO: 881898 - DNA, 99 bp, Homo sapiens
ctaaaattgaaagtggactatttaatagctaggtactagcaaaggccagacgtcttactcaacaacttccctgccaccacctccaccatcccatccggc

SEQ ID NO: 881899 - DNA, 99 bp, Homo sapiens
ttgcctctggttcagctcatacaacagcttcttaggaggagatgttaaagtaacccatcttgcaggacgacattgaagattggtcttctgttgatctaa

SEQ ID NO: 881900 - DNA, 99 bp, Homo sapiens
gtcgtgcgaacagcagctggtaccgaaggcggaggtggagcccgagagctgaaggaattgaagaatctgcagcagcaatacttacagattaatcaagag

SEQ ID NO: 881901 - DNA, 157 bp, Homo sapiens
gtcatcccgataccagtatccatatttggcacgttggtgactgaagtattcttgatatctcaccaacgtgccaaatatggatactggtatcgggatgacacaggaagagctggtgtccaacctggggacgattgccagatcggggtcaaaggtaagc

SEQ ID NO: 881902 - DNA, 99 bp, Homo sapiens
gggaagaggagctgggttggaatattcatcactgtcctgaagggtggagcgttccagttcctccaataaggcatctgtggtcccagctacttgggaggc

SEQ ID NO: 881903 - DNA, 99 bp, Homo sapiens
ctgttttttaagtggcagcagggacatcagctggcaattgtaaataggtttccaggatcaaaactaacctttcaggagataggaacaggtggcacatgt

SEQ ID NO: 881904 - DNA, 99 bp, Homo sapiens
acaaaacagcagatttcccaagagcagcggaaaatgatccagtcacagagcatcatggtccaccatcaggaacaaactcagccaggcaaagcccagccc

SEQ ID NO: 881905 - DNA, 98 bp, Homo sapiens
aaaaaaagagaaacctgggtgaactttcacggacaacctcagaggacaacgaagtgttcgcatggaagctccacaaagcagcagcctggtcacctttt

SEQ ID NO: 881906 - DNA, 99 bp, Homo sapiens
aagcctgagtatgatgcggtggtgataggagcaggttgctatgagtaatgtagaagaagccgtccaggtagcaattgatgtaggctaccgccatattga

SEQ ID NO: 881907 - DNA, 99 bp, Homo sapiens
cttcattcagatgtggtggaatatgccaaggaaaaactggagagcttcatcaaaaatagtgatagctttgataactgcccaagctggaacactatagac

SEQ ID NO: 881908 - DNA, 99 bp, Homo sapiens
ctcctgttttcccggctatgccatcatggcggatggcgtgtcctgtgaaggtgctggagaatctggtaaaagcaccattgtgaagcagatgaggatcct

SEQ ID NO: 881909 - DNA, 99 bp, Homo sapiens
caccgtcacgctgctggaggagctttgtcagtggaaatgcctgccccagagggatattgcttcagttgacctcattttttaaggaccctggctctgcgg

SEQ ID NO: 881910 - DNA, 99 bp, Homo sapiens
gtacttttgtggacagcatcccagatgcagacacgttgaatccgaggtgacatctgtggtctggccgaaggaggctagaaggaaggcatgtgctttgga

SEQ ID NO: 881911 - DNA, 98 bp, Homo sapiens
ccaggcggatggtgagcaatggcttgtctggagcgggaaagactactgtgagcatggccttggaggagtacctggtttgtcatggtattccatgctac

SEQ ID NO: 881912 - DNA, 99 bp, Homo sapiens
ttctacagtaacagaactaagaaaccggcatgcccagggagaaaaaactgcaggcattaatgtccgaaaggttacgtcgctggatttgtagacttggag

SEQ ID NO: 881913 - DNA, 98 bp, Homo sapiens
agcaaatcatactctttccatcagtctcaacatagaacaaagtgtgggatgctgtctcaggagatgaattgatgaccctggctcataaacacattgtc

SEQ ID NO: 881914 - DNA, 99 bp, Homo sapiens
cggttctgtgcgctaaccccggagcccggccccggggaactagggagcgtctccggctgcacagcgctcaggtgacaaccaaagccaagcaactgaagg

SEQ ID NO: 881915 - DNA, 98 bp, Homo sapiens
tggacttgaaaaaaactttgctgccaatactctggatgtggaaatggaggcccagaaagatgaaatcatctgccccagctgtaataggactgcccatc

SEQ ID NO: 881916 - DNA, 99 bp, Homo sapiens
gttactacagagccaataccagtaatttttcatagaatagcaacaggatcttatggaggccatttggattctcaggaagatttctgaaactggaaagcc

SEQ ID NO: 881917 - DNA, 98 bp, Homo sapiens
gaaggaagcaattttacaagaaaagccatacttgttttctctggggtatgattctaatatgctggactgggcagcctttggggtcatgacccttccct

SEQ ID NO: 881918 - DNA, 100 bp, Homo sapiens
ggtgtcatgagcaggaaggaacttgaccagagccttctgatctgtcaccctccaaccggtctcttcagtgtttccagcggttccttcctgctcatgacac

SEQ ID NO: 881919 - DNA, 98 bp, Homo sapiens
ttcctttcaagatttattcaaaacgtgtcaactctgcttaattaagcactttgatgatttaagaaatcttgaggatctctgggaaagtttagaaaatg

SEQ ID NO: 881920 - DNA, 99 bp, Homo sapiens
acgaccatctcgcactaccctgactacagctggagcgcccagaggcgagccctggtggaggaagaggtgactcgaaaagccctgtttcctggtgactct

SEQ ID NO: 881921 - DNA, 99 bp, Homo sapiens
cagttacctcagccaaacaggacaagcagatggggaataaacggtggaattccttagaagcaccggattcagttttgtttccatgggacttaaagtcta

SEQ ID NO: 881922 - DNA, 99 bp, Homo sapiens
cacgctgggccgggtgttgcgcctggcctacagcgaggctggtatctaccttagatggagttttagaagtccgaaatgaacatttttggaccctaggtt

SEQ ID NO: 881923 - DNA, 113 bp, Homo sapiens
tcaaatgcatgccaacattccagttttttaagaagggacaaaagaagcattcctgcgtaaatactgctgtaatactgtcatgcaaagtgtatcctttcttgtcgtatcctttt

SEQ ID NO: 881924 - DNA, 99 bp, Homo sapiens
gcgagcggtgagggagcccggaacgattccttcgcggaacaattgagagtgatcagcagctggactgtgccttggacctaatgaggcgcctgcctcccc

SEQ ID NO: 881925 - DNA, 99 bp, Homo sapiens
aagtcttccatatattttgattctgagcgtcaaacttgttatgcagcatataacaggggtgagcccctccagactccgaataggagatcaagagtttga

SEQ ID NO: 881926 - DNA, 99 bp, Homo sapiens
cagaatgagacccgttctccctccagaacatacacttacatctctagataacagtctgcactttcacccgtttcagaattaacactgaatcctccggaa

SEQ ID NO: 881927 - DNA, 98 bp, Homo sapiens
gtggatcgagcagctgaacgagtgcaagcagctgtccgagtcccaggtcaagagcctctgcgagaaggcacaattcagattcagaagcgtcaacagtt

SEQ ID NO: 881928 - DNA, 100 bp, Homo sapiens
gcaccactctttgcctgaaactttagagaagacgttcatatcattgtcttccagacaatgatatgaacgtcttctctaaagtttcaggcaaagagtggtg

SEQ ID NO: 881929 - DNA, 99 bp, Homo sapiens
aagaagtttgatgtgccgtgtggaggaagagattgcagtgggggctgccagtgctaccctgagaaaggtggacgtgctgagatatttggcaaagttctt

SEQ ID NO: 881930 - DNA, 99 bp, Homo sapiens
ttcagttcgtcatggggctgtttggaaagacccaggagaagccgcccaaagaactgaagcctccccagctttctgaggatgatatctggctaaaaagcg

SEQ ID NO: 881931 - DNA, 99 bp, Homo sapiens
tctatcacttacctgatgcagaatcagatgaagatgaagattttaaagagcagactagacttctcaaggtaagaatgattgatgttggctgatattgga

SEQ ID NO: 881932 - DNA, 75 bp, Homo sapiens
aattcttgaatgacatccgagcgaaagagaaagaggagtgtttttgggcctaggcctgagtggaatcattcctac

SEQ ID NO: 881933 - DNA, 99 bp, Homo sapiens
cctttcaattgctgatataatgtagcattttcaggccaaggttctgcagctggttgccacattctgttgaagtttgaatccccttggaaattcccatga

SEQ ID NO: 881934 - DNA, 99 bp, Homo sapiens
gcaaggaaggtggagatctcctgtgctgcgaccactgcccggctgccttccacctccagtgctggtcctcagaatggttggaatgaccctccagctttg

SEQ ID NO: 881935 - DNA, 110 bp, Homo sapiens
ctttgtggttgctgtgttggagctcctctttgctaaacctgcagcattaatgtcatctaccgaggcacaatgttcaggcacaggtttagcaaagaggagctccaacacag

SEQ ID NO: 881936 - DNA, 98 bp, Homo sapiens
ttttggaattttgtagaagccagtcaaaatattggatcatcagatcatgacgaaaaccgcctgattcccactgagttacgccgagaggctctggcctt

SEQ ID NO: 881937 - DNA, 98 bp, Homo sapiens
gcaggtcgaggacggtcggactcccgcggcgggaggagcctgttcccctgaggatactggtatcgggatgacacaggaagagctggtgtccaacctgg

SEQ ID NO: 881938 - DNA, 99 bp, Homo sapiens
gcccggctcatttggctgttttcttacaccatgtagtttcacaatttgaccctgcgactttgaaggtgatgaggtgggtactggcatcactgatgacaa

SEQ ID NO: 881939 - DNA, 99 bp, Homo sapiens
atccttctcaaccttgtgggatgtgaaaactctgttactgaagatctacgcagaccccaccaagaggctggagctgtacttccggcccaaggacccata

SEQ ID NO: 881940 - DNA, 98 bp, Homo sapiens
tgaagggacacagtacggtagtcaaacccccaggaatcaaagatcaactcccactgaggacaaatggacctgtaattccgggtgtgacgagagaacga

SEQ ID NO: 881941 - DNA, 98 bp, Homo sapiens
tacagggattggtgccttccgattcatgctggaatccaacaagggcaaatcaatgttggagttccagaaattacagaagacatccccgtgaagacttt

SEQ ID NO: 881942 - DNA, 100 bp, Homo sapiens
attctcgatccagaggaaggcgatactctcgctcacgctcaggcttcgtcccctgctcctgctgcgtgagcgagagtatcgccttcctctggatcgagaa

SEQ ID NO: 881943 - DNA, 99 bp, Homo sapiens
agcatctgcgatgtgaggaaaggcacctccaccaggtatatgagtagaccagtgatgagtggcccaggactctatgaccctacaaccatcatgaatgca

SEQ ID NO: 881944 - DNA, 98 bp, Homo sapiens
gctgcccatcgaggagacgctggaggacagcccgcagcacttttccagccattaactccaggctctcgagaatttgaagatgttgtaaatattctcca

SEQ ID NO: 881945 - DNA, 99 bp, Homo sapiens
agaaaacatacattcctgatcctgacaatttgacttctcaaagaagatagcattcaaaggatgaatagtagactcgtaattccagttcagtgcagcttt

SEQ ID NO: 881946 - DNA, 99 bp, Homo sapiens
ctggatcgacacagctgatggctctgccaatcaccgggcccgggtcaccaccaggattggcctaatgaagaagttcaacctggagagatggaaaatcag

SEQ ID NO: 881947 - DNA, 99 bp, Homo sapiens
catgagatgcaggaccttggggacaagctgcgcatgatcgtcatgggacacagaagtcaccgagacttggagccagaatctgagcctcagctggagtca

SEQ ID NO: 881948 - DNA, 98 bp, Homo sapiens
ggcgggacagagcgcctgcgaccccagtcggtgctccggggaggtcacctgacgaggagggcaatttgcatatttctccaaagaaccatccagaacct

SEQ ID NO: 881949 - DNA, 99 bp, Homo sapiens
cgcaactacgctccgctccgcgggccaagaaactggagaaactcggagtgtactccgcctgcaagatatttagcttcctgtggtatactgatgagcaga

SEQ ID NO: 881950 - DNA, 99 bp, Homo sapiens
gaagagatgttgctcaactcagacatcttctggaagccccaggaggctgtgcagggttgaaagtaacggaagcctacagaaactgatccgcatccgaaa

SEQ ID NO: 881951 - DNA, 99 bp, Homo sapiens
ctgtttctctgctgcaccgacctcgacgtcttgcctgtgtcccacttgttcgcggcctatagagtccggcagcgtcttctcttgagggagcaatttgga

SEQ ID NO: 881952 - DNA, 99 bp, Homo sapiens
cccccacctttcctcaggagtcatttctgttccgcacaggcctgctgaactgggtgctttatatagggaagaggagcaggacttggatggtgagaaggg

SEQ ID NO: 881953 - DNA, 99 bp, Homo sapiens
tcacgctcattggccggaggaagctcaccttcgacgaggaagcttataaaaatgtgaggccccataaagccactgccgaagaaatgacaaaatatcaca

SEQ ID NO: 881954 - DNA, 98 bp, Homo sapiens
agcactcgactgaaagtgaaggacccagactctagttcggatgtgatgctggtacaacccagagtagaatttattctgtctttcattgaccacattgc

SEQ ID NO: 881955 - DNA, 99 bp, Homo sapiens
aaacactggaaaatagcttaattcaatgatgaggataggaattcactcaggctccgtgctggctggagttgttggggtgcgaatgccacgttattgcct

SEQ ID NO: 881956 - DNA, 98 bp, Homo sapiens
tgctgggggtcatcgacagctgcaaggaggccgtcaccttcaaggccgtcagacaagggtctccaactgaattccttgaagagaaaatggcctaccag

SEQ ID NO: 881957 - DNA, 99 bp, Homo sapiens
tgaaacgtcagctgcgctcccctaggagtgctgagcccgcggaaccgcagccatgaaatgcactcggtgatggaaagagagccactattctgaagaaca

SEQ ID NO: 881958 - DNA, 99 bp, Homo sapiens
gttgtgccgcgggtgggcaacgggaccctgtgccccaactctacttccctctgctccttcccagatacactctgtgcagttttagagagagacacactc

SEQ ID NO: 881959 - DNA, 99 bp, Homo sapiens
ccagagtcattgcaggaagtggatgagttccacctcattttagagtatcaagcagaataactgaagtgaagtgatggactccgatttggagagtagtaa

SEQ ID NO: 881960 - DNA, 99 bp, Homo sapiens
cgggacccgcttcgaggccgctttggcgccaaatcctgagacctcctgccccccgaggtctgcagtctcctgaacccagcagccatctacgccaacaac

SEQ ID NO: 881961 - DNA, 99 bp, Homo sapiens
atcaagtcgtaaaaacaggtcaagtggctcccagccaacctctgataaaccctcccagcggccatcagagagcacaaattgtagccctacccggaaaag

SEQ ID NO: 881962 - DNA, 99 bp, Homo sapiens
taatagctgacatgtgtatgcaaaaggactggtgaccagttagaaacatggagcagctctacctggatggaatgaactttaagaagcaggtggatctga

SEQ ID NO: 881963 - DNA, 99 bp, Homo sapiens
ctgctccccacgatcaagaactaggttttttcctagaaacaggacttcagagagcccatgtcctctatttcaaaaatggtgacacctcacactcagtgc

SEQ ID NO: 881964 - DNA, 99 bp, Homo sapiens
gagagaagacgatctgcacttcgcattttggcattgacatttaattttagggtcctttatatagaagggagagtagtgatgaattgactctggaaggca

SEQ ID NO: 881965 - DNA, 99 bp, Homo sapiens
tgaggacacacccaggaaaagactcaggacggacaagcacagtcttcggaagcttgccgggattgctgtccttgccattggactatggctccgattcga

SEQ ID NO: 881966 - DNA, 98 bp, Homo sapiens
aatgttaaagcagaaagcagcacagcaggcagcctcttccagtgggcagggtcagcaggcccaaacccccacagctccaagccaggtctggaacatga

SEQ ID NO: 881967 - DNA, 99 bp, Homo sapiens
ctgcgtccagccataacccaggagtaacatcaggtacaggtttgcagattccgccagcagcacagcaagctctacagatgagtggctctttggcatttg

SEQ ID NO: 881968 - DNA, 99 bp, Homo sapiens
ctcccgagtagctgagactacaggtgtcagtgtgaagaaggggcatgagctggtgaacatctattgccccatcgtggtctccaacgcaggactgttcaa

SEQ ID NO: 881969 - DNA, 99 bp, Homo sapiens
ccccataacgtttgcaccatttaaaatttcttgtgacagtcattttgtttactcattcagccctgttgcaggtcccaataaactcttcataaggttgac

SEQ ID NO: 881970 - DNA, 99 bp, Homo sapiens
ggatgctgtgaaaaatggggattatattactgtaaaagttgcacttaattcaaatgaagaatataacctggaccaagagtagagacggggtttcaccat

SEQ ID NO: 881971 - DNA, 99 bp, Homo sapiens
gcatcctggccgatgccacggagcaagtgggccagttccatgccattgcagtgtcaactaggcctcagttacttttcagtttgcccaaattgagcccat

SEQ ID NO: 881972 - DNA, 99 bp, Homo sapiens
gtccggccagggccggcgcggcgatgatgaacaggttccgaaagtggctctacaaacccaagaccatcattgaatgtctaaaatatatttgtactggag

SEQ ID NO: 881973 - DNA, 98 bp, Homo sapiens
acaacttcttttacagcagcaaacaagtggattgaaatctcctaagagcagtgataaacagagaccactgcaggtgtcagcagttgagtctttggagg

SEQ ID NO: 881974 - DNA, 99 bp, Homo sapiens
gattacctcggtgccgatcagcggaagaccaaagaggatgagaaggacgacaagcccatccgagatgatccagatcctgatgatggatttaactataaa

SEQ ID NO: 881975 - DNA, 98 bp, Homo sapiens
aagtttaaacaaccctgccatgttgcaagttcttctacagccccagttatgtggacgagctgttaaaccagagctttatttacaagaaacatttaagc

SEQ ID NO: 881976 - DNA, 99 bp, Homo sapiens
gccctgtcagaggcgagtgagaaggacgaaggggactcggatgaaggaggcctgcagtatccctgggattgggaagcggatggctgagaaaatcataga

SEQ ID NO: 881977 - DNA, 99 bp, Homo sapiens
ctcgaatcattctttgtacagaaattgaaaggcttcaaagctagcagggcaattgaaggaacagactaaaaatcgtgtcctggaaggaaactacaggta

SEQ ID NO: 881978 - DNA, 98 bp, Homo sapiens
caccctgcagttccaggagctgctgcgcacgaccggcgcctcggacaccttcgagggttggccttggggctctattttgcggaattggaatttcttag

SEQ ID NO: 881979 - DNA, 99 bp, Homo sapiens
accatgcaagctttgtcggaagaggaccggaggctctggatggaagccatggatggccgggaacctacctttccaaagtgaaactgatgagatttgatg

SEQ ID NO: 881980 - DNA, 144 bp, Homo sapiens
gggtaaaggagcagcaccaaatgttgtctatacatatactggaaagagaattgcattatacagacttgtgtccagggctgggttctccagagtaccattggctccctgagccatgttagatttccaatatataatgcaattctc

SEQ ID NO: 881981 - DNA, 99 bp, Homo sapiens
ggaccctgtaaaagctgtaaaatgataacagagaattctgcttggtcagaatcgtgatggcattgtgttcagcactgatgactattttcaccatcaaga

SEQ ID NO: 881982 - DNA, 99 bp, Homo sapiens
tgaacttctcaggaagcagtactattcaagagggaagaggaagaacgtctgagaaataaaattcgagctgatcatgagaaggccttggaagaagcaaaa

SEQ ID NO: 881983 - DNA, 99 bp, Homo sapiens
acaacccgtacgtgcggaaggccctcaacatcccggagcagctgccacaatgggacatgtgcaagtatcctgaagaacttgcctggcacacaaatttaa

SEQ ID NO: 881984 - DNA, 99 bp, Homo sapiens
agaaaatcagaagtacagttttatctagccacatcttggaggaagttggtgaaccatctaaagaagagaaggctgtggccaagtatcttcgattcaact

SEQ ID NO: 881985 - DNA, 98 bp, Homo sapiens
gggctcgcgggtgaccgaaaggatcatgaactagtgacctggaaagggagaaactctggaaaccttgacaatggcaacagtgtgtctcttcagcgcac

SEQ ID NO: 881986 - DNA, 99 bp, Homo sapiens
cttctgagtagttgggaccacagatattgatatgctggaggaatttgcctacttgagaactcaggaaggtgggaaaattcatctggaattactacccaa

SEQ ID NO: 881987 - DNA, 99 bp, Homo sapiens
caaattttctatctcttccataggctcctgctgaggatctctggccacacagagccataggcgccagagcccactggagacaggttctggtaacgctcg

SEQ ID NO: 881988 - DNA, 98 bp, Homo sapiens
gagtgcgggcgcgccccaccaccgccctcaccatgttttcggctttgtgagaaaccttaccatcaaacacgatggccagcaacgttaccaacaagaca

SEQ ID NO: 881989 - DNA, 99 bp, Homo sapiens
tgcaaaaggggagctggctacttctcgctctgcttcatcccactattattttggcacaacaggaaggccctcgggaccaaggatcacgtcatgactccg

SEQ ID NO: 881990 - DNA, 99 bp, Homo sapiens
gcctctgggtcctcggtcggtacagtctctgcacctcgcgccccagcagaggaagaagcccctccagatggtgctgttgccgaatacagaagagaaaag

SEQ ID NO: 881991 - DNA, 99 bp, Homo sapiens
gtgaagtcaatgttccgggaagttcttccaaagcaaggttggcagcgctaaaccgggccttcagaaagttgttgatgtgctggattccattaaaacaaa

SEQ ID NO: 881992 - DNA, 98 bp, Homo sapiens
attcatctttaaggacgaagagagatgtgaatgaatgtgaactgctcagtggggtgtgtggtgaagccttctgtgaaaacgtggaagggtccttcctg

SEQ ID NO: 881993 - DNA, 138 bp, Homo sapiens
gccgaggctgaaggaagatggcggacggcgtggaccacatagacatttacgcggatgtcggcgaagagttcaaccagggtatttgaagtataccatacaactgttttgaaaatccagcgtggacaatggctactcaag

SEQ ID NO: 881994 - DNA, 98 bp, Homo sapiens
acccgcgtgtgccctaagcacacctggagcaacaacctggcggtgctcgagtgcctgcaggatgtgagggaggtctctctcctcctgggcgagccgtt

SEQ ID NO: 881995 - DNA, 99 bp, Homo sapiens
cccaggactctgcgactttacaagctaccaatggtgcggtgccccagggccagcgaccaccgcctcgtatcaagaatttccagataaacaaccagattg

SEQ ID NO: 881996 - DNA, 99 bp, Homo sapiens
cagaattgggattccagagttcaaatacgtggcaaatatgcatggagatgagtgtcagtatgtctacctacatcagtgtgtaagagatgtcctcagagc

SEQ ID NO: 881997 - DNA, 100 bp, Homo sapiens
ctgggctacagccatgaataacctgggcatggttcccgtagggttgccgtccaggcaaccctacgggaaccatgcccaggttattcatggctgtagccca

SEQ ID NO: 881998 - DNA, 99 bp, Homo sapiens
gacctggatgacatcagcaccaaaacaggcatcaccctcaagagctgccggagacagacaaatggaatcctgtgctgaacccgaatcttccaaaaaaca

SEQ ID NO: 881999 - DNA, 99 bp, Homo sapiens
agcagcctggctcctggtggctccagcagcaggtgccactgattaatgaacttgaatcagcaatacatcagctgtacaaacagcgagcttcccgccttg

SEQ ID NO: 882000 - DNA, 98 bp, Homo sapiens
taggcctcgctcagggcggctgccccgggacccgcagaatttctctgcaaagaatgtccaaaaattcatattcacattgatcgtatcgacaaaaaaga

SEQ ID NO: 882001 - DNA, 98 bp, Homo sapiens
actgcaggagacttgcctgtgaaagatacaggtctaaacctctttggaatgggagggttacaagcttgctgcagaggaacccagccacttggaagcca

SEQ ID NO: 882002 - DNA, 99 bp, Homo sapiens
gtggacctgtgtgcatatcacgcccccgtgctggtagtggatggaaagacaatattcagcacaccactgaggaacctcaaattccgcatgtctgtgaat

SEQ ID NO: 882003 - DNA, 99 bp, Homo sapiens
tcatcgacagtgccttcggccagagcggcaagttcaagatccacatcccaggtcagtaggcatccagcgctggggcagctgcttcaggacatcgccgag

SEQ ID NO: 882004 - DNA, 100 bp, Homo sapiens
cctgcccagcagaatttgtatagagatgtgatgttggagaactagaccaggtttctgtagttctccaacatcacatctctatacaaattctgctgggcag

SEQ ID NO: 882005 - DNA, 98 bp, Homo sapiens
ccgatgacttggtactgaccctgagcaacccccagatgtcattggagggtacaggaaggatttgatgccctggatccctttattcccatcctggtttc

SEQ ID NO: 882006 - DNA, 99 bp, Homo sapiens
aggactgctttatggacttgcatcaggagtagcaaatcgagctgggagcattagtacccttgattctttagactttgcaagatattcagatgatggtaa

SEQ ID NO: 882007 - DNA, 98 bp, Homo sapiens
gagtggcaacttcaggatgacaaaaaccaaagtctcttctgctgggaaatcccagtacagatcattcatgttacatgtaaagctgtcctcatttgtga

SEQ ID NO: 882008 - DNA, 98 bp, Homo sapiens
aggaaaaatgcaatcatattccgtgaatcatttgctgatgtacttcctgaagcagctgctctagtgaactactgtgtgaagacattcacaggacacag

SEQ ID NO: 882009 - DNA, 99 bp, Homo sapiens
taaagctgaggctcggccagggactgtgatatacccacatccccggaactaggtgatcgcggtgcaggaaccagagcttccatacaatgactactttga

SEQ ID NO: 882010 - DNA, 99 bp, Homo sapiens
tggccatagaatggccgggcgcctaccccaaactcatggaaattgatcaggagtggaaatgaagaagatcactgacacccacacgccgtctggcctcac

SEQ ID NO: 882011 - DNA, 102 bp, Homo sapiens
ctggcaacagagcaagactccatcacttctgtagaggaagaaagaaggatgacgcgtttcttcctctacagaagtgatggagtcttgctctgttgccaggct

SEQ ID NO: 882012 - DNA, 99 bp, Homo sapiens
tggaggccaaggaccccaagctccgagaagaccggcggccaatcacagtccactttggacagtttaaggaagaaatctctaaacgttttaaatcacata

SEQ ID NO: 882013 - DNA, 99 bp, Homo sapiens
ggcaataaaacagcaaacaccaaagcaagttgcacactgagtcttcacacgtcttgttctcttcggcagaatgttcatccttgtgcctggctctgggga

SEQ ID NO: 882014 - DNA, 99 bp, Homo sapiens
atcgaactcaaggaatcttcagcaaaggcttatggagattttgcatggagtaaccccctgcatccagatatcttcccaggactacgcaagatagaggca

SEQ ID NO: 882015 - DNA, 99 bp, Homo sapiens
ctctgggcgaaaattggatgtgaaaatgaagccagaccgagtgtgggcgaaatgctgaaaacttcgaccgatttttcacccgccatccaccagtcctaa

SEQ ID NO: 882016 - DNA, 99 bp, Homo sapiens
gagattatgggatgttcgagataataagatagttcgtcacactgtgtatctcctggtaacgcctcgtgttgttggtctcactctgtcacccaggctgga

SEQ ID NO: 882017 - DNA, 99 bp, Homo sapiens
ctccttgatggacggcaccctcttcgattccagacctcccctcaactgggggctcgcttagtgtggctgctggtgggaaaaaagcagaggccgcagcct

SEQ ID NO: 882018 - DNA, 99 bp, Homo sapiens
agcagcatctgtgcagacaccgactcgtggaccactttcatagcatcgccctgagcaactggtggtttgtggcccacctgacagacctgctggaccact

SEQ ID NO: 882019 - DNA, 99 bp, Homo sapiens
tctccagcgccggcctcctcagtgcgaagaagctgcagccgcacctggccaagggtttctacgataaagacagttcagggtggagttctagcaaagata

SEQ ID NO: 882020 - DNA, 99 bp, Homo sapiens
atatacaacaaggccattttctcaaacgagagtcagcctttaacggctgacgttcctcagggagtgattcgagtgcaagctccccatctttcgaaagtt

SEQ ID NO: 882021 - DNA, 98 bp, Homo sapiens
gacaagagagaacgcaaacagtttgaagctgaggattttcaatcatggctctgaaggagcgcattggctggagatacagcctcctcttcgtgggccta

SEQ ID NO: 882022 - DNA, 98 bp, Homo sapiens
ggaagtaaaaggtgaagccaagaacagcattactgattcccaaatggatgatgttgaagttgtttatacaattgggtctcgctctgttgcccaggctg

SEQ ID NO: 882023 - DNA, 113 bp, Homo sapiens
tatgacctgctacagcggctgggtggcggcacgtatggggaagtctttaagggtaacacgtgccatcagtgtcgacaaaagaccatcgacaccaagacagtgtgtcggaacca

SEQ ID NO: 882024 - DNA, 99 bp, Homo sapiens
gtgggcgtaggaccctccgagccaggatacaagtgatgccttcaaatttgagctcagtttcttatggtcgtttaggagcatgagggtttctgcaataat

SEQ ID NO: 882025 - DNA, 99 bp, Homo sapiens
atcttgtgtgttacatttctgtgagggcccaatgtaaaggctgttgctactgctgtggaacagatttacccatttgtgtttgaaagcaggaaagaaatt

SEQ ID NO: 882026 - DNA, 99 bp, Homo sapiens
cgttgcgagctgcagctgcgatctctgtggtaggcccagaattccatacgacataatctgtcattgaacaaatgtttccttaaagtgcctcgatctaag

SEQ ID NO: 882027 - DNA, 98 bp, Homo sapiens
tttgtcctaacctccatcatccagctaatgtcatagctgatgttcctggagaccagcgctctcacaggcgagaacgtggaggaggcgttcctcaagtg

SEQ ID NO: 882028 - DNA, 99 bp, Homo sapiens
ttgggtaatgatgattatgctgtatatgtgagagagaatattcagattccgttgcagacgctctggatggcgaataccattaaacttctggatttggta

SEQ ID NO: 882029 - DNA, 99 bp, Homo sapiens
cttcatgtggaacttcagggtggaggcaggtttaatcgtatgggcatgcttttcatgaatgaaggcaccagcaattcctcctgctcctgcatttaaata

SEQ ID NO: 882030 - DNA, 98 bp, Homo sapiens
gacgtcccaccgggcaggatgaaggcagagcgtgtggcatctccacctcaagggtgatgttggaccaaatggacaacctggaccaatgggacctcctg

SEQ ID NO: 882031 - DNA, 99 bp, Homo sapiens
catggcccaggcagaccttgcagtcaaagtatgctaccgcattcttatgcaactctgtggacaatatgatcagccagtgcttgcagttcgagtgctttt

SEQ ID NO: 882032 - DNA, 99 bp, Homo sapiens
ctctttcccatcctactgcagacgttatcggatgaatcggatgagttctttggggtgactttcaagatggactctactctaacagcaagtgaaatccgg

SEQ ID NO: 882033 - DNA, 99 bp, Homo sapiens
aaagactggacagtgacacctgagcacgtcttgcctgagtcccagcttcttctcagcctgttgataaccatgttagcccatcttccttcttgggccaga

SEQ ID NO: 882034 - DNA, 98 bp, Homo sapiens
cagtccaagtcccggaagatcgcgatcctgggctaccggtctgtggggtcatgtaggtacaacagcaaccaagaagatcgatgtctacctccctctgc

SEQ ID NO: 882035 - DNA, 99 bp, Homo sapiens
aaaggaagacttgtaacctggagaagaggtaacggcgactgtgactgtggtgaatgtgtgtgcaggagcggctggactggcgagtactgcaactgcacc

SEQ ID NO: 882036 - DNA, 99 bp, Homo sapiens
ggcacctatggacaagtctataagaaaatatggacttgaaggagcagccaggtaacactatttcggctggtcaagaggatttcccatctgtcctgcttg

SEQ ID NO: 882037 - DNA, 99 bp, Homo sapiens
atagtcctgctgaccagactctgattgttcagtcccagcctgtggaggtcatctatgatgctgaattcgatgtcttctttccgtcctgggagaggacat

SEQ ID NO: 882038 - DNA, 100 bp, Homo sapiens
ccaaagtgctgggattacagggaattctggaggtggaaatggagttgatctttcagtgctaaatgaggctcgcaatatggtgtcagatcttctgactgat

SEQ ID NO: 882039 - DNA, 99 bp, Homo sapiens
gacaaaattttgtggcgctctgcgtcccctgaaggtttcgtttataatgtcagcccttatatggagtatcatcctggtggagaagatgaactaatgaga

SEQ ID NO: 882040 - DNA, 99 bp, Homo sapiens
cgttagtagcagcggggcacagaacagcgacagtacaaagaagactcttgtcacactaattgccaacaacaatggtctccggcaagaatatgcagccac

SEQ ID NO: 882041 - DNA, 98 bp, Homo sapiens
caccggccgcctcagccatggacgcgtccctggagaaggtttcaagtgccccatttgctccaagtctgtggcttctgacgagatggaaatgcacttta

SEQ ID NO: 882042 - DNA, 99 bp, Homo sapiens
gaagttcaagatcaaagtgccagcagattcagtgtcatgtgaggacgtgcttcctgcttcatagataagagcagcagccgctcttctaaaacattcaaa

SEQ ID NO: 882043 - DNA, 99 bp, Homo sapiens
atgtggacgttgatctctcagccaaacagaagatggctgtgccacccacgtatgccgatcttggcaaatctgccagggatgtcttcaccaagggctatg

SEQ ID NO: 882044 - DNA, 99 bp, Homo sapiens
aaggatctgcagccatttatattgcttaggctactggttcattccgacaggaccaccccagtagcatgggtgtttatgggcaggagtctggaggatttt

SEQ ID NO: 882045 - DNA, 99 bp, Homo sapiens
ttccgctggctcagccgcaagtacccgtccatcatagtcaactgcgtggaagagaaggattttttatcaagcagaaatgcatcgaacaacgagaatcaa

SEQ ID NO: 882046 - DNA, 99 bp, Homo sapiens
gcttcagaaagagcatcctcagcctctgtgagctcctccagcttgagagcgcaaaagatgcaggaatctcccatgcacttgtgagttgtaagctgccta

SEQ ID NO: 882047 - DNA, 98 bp, Homo sapiens
gagcagggagggctccgctagcccggggggccctccccgcggggcagatgtgcccaaggttgaagcaatgaataaaagactgggctccttggtggatg

SEQ ID NO: 882048 - DNA, 99 bp, Homo sapiens
ctggagctgggtcagtccgccgctcaccccgcggccgcaccttcccgccttctcagtggttcagcactgagtcatgcttgcttctgctacgcactgatt

SEQ ID NO: 882049 - DNA, 99 bp, Homo sapiens
ggcagctgcggagcatgtcgaccccggcccggaggaggctcatgcgggatttcaagcggaataactcaagtcacctgtactggaaatcagtttgctgaa

SEQ ID NO: 882050 - DNA, 99 bp, Homo sapiens
gctggaatccaggcctgggtgctgcatggtggcgcccctccccgtgaccaccgctgcgttttctcggggtatgttttaaagaagctgttttttcattac

SEQ ID NO: 882051 - DNA, 99 bp, Homo sapiens
gctaaatcctaccagtctacaaaaggctcttgatggaaatgtgtatgatcatctcaaggattatttaatagccttcagccggactgagctagaaacatg

SEQ ID NO: 882052 - DNA, 99 bp, Homo sapiens
ccttgttgtctttcatgagcttgaagatggcagccagctgttccttctgaactcagaaagggcgtgcagacccaggtgaaggtgcccacggctgacagg

SEQ ID NO: 882053 - DNA, 98 bp, Homo sapiens
acatggcggagctgacggtggaggttcgcggctctaacggggctttctacaagctgttttcactcattagctcctgaggtaaacaaattgaaaaaatg

SEQ ID NO: 882054 - DNA, 99 bp, Homo sapiens
gtgcatgtaaacatcaagccattctggattttcagaatgaaacgtaaccttggaacttgtgcatccttccaatttacggggcccttcacctggctcagg

SEQ ID NO: 882055 - DNA, 111 bp, Homo sapiens
tgtgcaagccagggatgagaaccctggtctaatgctgtacatctaaatggcgactagatgtacagcattagaccagggttctcatccctggcttgcacacccagagcctgg

SEQ ID NO: 882056 - DNA, 99 bp, Homo sapiens
tgtagggattctgggtttgttcttcacctattgtctgtaaaggagatttctgaatccacggccatctgtcattttctgcagctgtccacgcatttataa

SEQ ID NO: 882057 - DNA, 99 bp, Homo sapiens
agcaacttagcgaagctgccggtgaagatggatgtacagttacccagcacgtgtacctcctcctcctcctattgctcgggctgtagtgccctcgaaacg

SEQ ID NO: 882058 - DNA, 99 bp, Homo sapiens
ggggaaccgccgccccggccggacctcgaccctgagctctatctcagtgtacacggattttataacctgacagcgtgctggaacttctctgctggactc

SEQ ID NO: 882059 - DNA, 99 bp, Homo sapiens
gagcagaaggagctacaggcgctctacgccctccaggcccttgtagtgaccttagaacagcctcccagaagctgatctggatgcagaattagaaaactg

SEQ ID NO: 882060 - DNA, 99 bp, Homo sapiens
acctactgggattccttgggcaatggtgaatttgaaaaggaaaacgggccttactatacatcatatcccccatcaccagatttgtgacctgccatcttt

SEQ ID NO: 882061 - DNA, 99 bp, Homo sapiens
gggacacgcctagcgcgggctccaggtcaaaatgcagatcttcgtgaaaacccttaccggcaagaccatcacccttgaggtggagcccagtgacaccat

SEQ ID NO: 882062 - DNA, 98 bp, Homo sapiens
gctgccggctggatgggaagttaatgtttacggcgaagtctactcaacgtttccaagccctcccaggcccaatacttcaaagcatcctacctctgctc

SEQ ID NO: 882063 - DNA, 98 bp, Homo sapiens
ttcctccgaggccatggattacattaaaagaacgagaccaaattctgccgtcagggaaatcctcattgacgattcaatttgttgaaggccaatttgtg

SEQ ID NO: 882064 - DNA, 99 bp, Homo sapiens
ctcatgctaagcgagctagacagccactttcagaagcaagtaaccagcagcccctctctggtggtgaagtgctacacacgcagggccctgtcgatggca

SEQ ID NO: 882065 - DNA, 99 bp, Homo sapiens
tccatcttcgggatcttcgacgggcacgggggagaggctgaagtcatcgatgtgagttatggaatggcagatgatttaaaaaggattaggaaaataaaa

SEQ ID NO: 882066 - DNA, 99 bp, Homo sapiens
cagaccagttctctggtccaaaaattatgcaagaagctaccatagaggaggcatactccaggtcaatgacaaaactagcaaaatctgcaagcaattatt

SEQ ID NO: 882067 - DNA, 99 bp, Homo sapiens
ctgtaacttacgtgtactttaccaacgagctgaagcagttatttcaagtaccattggaagaggaaggacaacgtggtggacctatccttgcaccagagg

SEQ ID NO: 882068 - DNA, 99 bp, Homo sapiens
cggacttcatggatcatccgtttgttgacaaggagtacttgattcttcagaaaacctccaaagtagatgtggactcaagtggaaagaaatgcaaagaga

SEQ ID NO: 882069 - DNA, 99 bp, Homo sapiens
cacgccggtgatcatagccatccagaccttctgctaccagaaaaccttctccaccagaatccagctcacgctggaagcccatgaaacctttaatgagtg

SEQ ID NO: 882070 - DNA, 100 bp, Homo sapiens
ttttactaaatgctgatgtaataatgctgatttctctccacaccaccggctggtctgggaaattcacaaacttggttgccaggcgtccatttttagtaaa

SEQ ID NO: 882071 - DNA, 99 bp, Homo sapiens
ctgaagttaatggttctatgaaacagtgtatcaaagtgtggactgaggtcacggagctgctggacgtctccatggagctgggctgtttcctggctggag

SEQ ID NO: 882072 - DNA, 99 bp, Homo sapiens
aagacaaagcttttgttaattatcttaaatacttgctttactggaaagacccagaatatgccaagtatctaaatttagcagccactgctgcatcagggg

SEQ ID NO: 882073 - DNA, 98 bp, Homo sapiens
cagggggaaaaaatgtctttcgggccgctttccaggaagcagcaggatgcgccgctccactgtcggtagcaacaagaaactagaaaaactgcttttgg

SEQ ID NO: 882074 - DNA, 99 bp, Homo sapiens
aataatttctttctcgctgatcgcctaacttctactgacgaagcttggaagttgcagaagagctgcggtgcaaccctgggcagtttgcgtgtcgcagcg

SEQ ID NO: 882075 - DNA, 99 bp, Homo sapiens
cagcaggccaggagaggctggcgccccttctcccaagaatactgtcagatgctgatcctgacaccacctgggtatcactctgtcacccaggctggagtg

SEQ ID NO: 882076 - DNA, 98 bp, Homo sapiens
agctcgttggctggaagtgctgcgcacctacttggagctggtgctttgcgtgctggtcagcatccggaacaacaggtttctgctttgggacaaccata

SEQ ID NO: 882077 - DNA, 98 bp, Homo sapiens
ggctctaacggggctttctacaaggacccattccaacaatctcgtaaaacatggtggattactatgaagttctaggcgtgcagagacatgcctcaccc

SEQ ID NO: 882078 - DNA, 99 bp, Homo sapiens
ctaacccgacccggattggcgctgaggtggcccgtggggcaggaattgaatgatctggcacgggaccctccagcacagtgttcagcaggtcctgttgga

SEQ ID NO: 882079 - DNA, 98 bp, Homo sapiens
gttaatagtggcatggaagatccatttgaataatgcatatactgccatgtcagattcctacttacccagttactacagtccctccattggcttctcct

SEQ ID NO: 882080 - DNA, 99 bp, Homo sapiens
gaagatcctggtgtcgccatgggccgccgccccgcccgttgatgtccggtctgtgctacgacagcaaaatgttccaggtgcatcaggtgctctgcatcc

SEQ ID NO: 882081 - DNA, 99 bp, Homo sapiens
gagaagtttcctgaaagaacaactgttactgaattacctcaggtaaaaatgttgtacatcagctctcagtaaccctagaagacttatataatggtgcaa

SEQ ID NO: 882082 - DNA, 130 bp, Homo sapiens
ataacctgacagcgtgctggaacttctctgctggactcctggactcccacaatgggccgggtatgactttgcaactgaagctgaaggagtcttttctgacaaattcctcctatgagtccagcttcctgga

SEQ ID NO: 882083 - DNA, 99 bp, Homo sapiens
tcgagactactggccgaaggggcgtctgcggctctccgccgtccccagccctgcctctccctgggctctgggaccagttactctccacaagaaaattca

SEQ ID NO: 882084 - DNA, 98 bp, Homo sapiens
gtggtcaaagccatccatgacctctcaactaggctgctcccagaagtggtatggcagatcccagaaaatggactcaccctttccctgactgaacctgt

SEQ ID NO: 882085 - DNA, 99 bp, Homo sapiens
aaccctgctaaccttagcagaagaaaggacggtagacctgcccaagtctcccaaggaattttctgaaccaacaattattctctttgaaagagaagactt

SEQ ID NO: 882086 - DNA, 99 bp, Homo sapiens
cgcagggaggatgtcgggacaccccggaagctgggaaatggcttttcctccaaatgcgatcattgtatttttctactgcagtgcagtgactatattctt

SEQ ID NO: 882087 - DNA, 99 bp, Homo sapiens
cgactgcggcgcgctgctggacgaagagctctcctccttcttcctcaactatctcgctgacacgcaggactccctggaggaaaagcggaagcggcagcg

SEQ ID NO: 882088 - DNA, 99 bp, Homo sapiens
aactgctcaggcagctccgtagcatgaggaagagtcaggggcacagagagatggagagagacctagttagattttggatttagtaaaggggacacatta

SEQ ID NO: 882089 - DNA, 99 bp, Homo sapiens
tgcattcagctcctctgtgtttgccgcctggatataagcttaccaaagtcagcaacaatatgctacacagctgctttgctcaaagcaagagctgtctct

SEQ ID NO: 882090 - DNA, 129 bp, Homo sapiens
agccggggagctgcaggaaccagactgggggcgagctgagcacctgtagtcaatcacacgcagccatgtcagtttgaacagtgcatcgtgtgttctctgcagtcactgaagggggttctggagtgcaag

SEQ ID NO: 882091 - DNA, 99 bp, Homo sapiens
tggagcagatagtgcttactaccaggttgggcagacgggcaaggaggggaccgagaatcaaggcgttgagcctcaagctgacagtgaagatagtactgt

SEQ ID NO: 882092 - DNA, 99 bp, Homo sapiens
agatggctacaggccgcggaggaggaggaggtggagttgctgcccttccggagtccgccccgtgaggagaatgctggagaatgctggaggagaccttaa

SEQ ID NO: 882093 - DNA, 99 bp, Homo sapiens
gggtgatttctgcatttccatctgaggccttgttccggacagtggccatgatggtcccagattacgccctcattggagaaatctccctctactccatgg

SEQ ID NO: 882094 - DNA, 99 bp, Homo sapiens
ctatttttcacccattcatcatcaggttcagtatcaagttcagttgcgggaccactataccagtcacttggtaagatttgtaatatgtggatagttcat

SEQ ID NO: 882095 - DNA, 99 bp, Homo sapiens
ctacccagggagaggaattacgggaacagaaagaaaagtccgaaagagctgaagctgccagtaactcagattctagccatgaaggtcaagaggaatctt

SEQ ID NO: 882096 - DNA, 99 bp, Homo sapiens
cacaagcggtggacgtgctgctctacactccaggggacaggggaggcctcctcaggatccacagatgcccagtctcccaagaggggcctggtccccatg

SEQ ID NO: 882097 - DNA, 99 bp, Homo sapiens
cccagctggtggctggagcgaccccttgttctttggtggcgctgtgagtatctcgctgtgtttaagaagactgtgtcctcccatgaagtctttcttcag

SEQ ID NO: 882098 - DNA, 99 bp, Homo sapiens
ttgctcacttcaagaagaacagcagcagttaagagaacaaaatgaattaattcgagaaagaagtgaaaagagtgtagagtagagacggggtttcaccat

SEQ ID NO: 882099 - DNA, 99 bp, Homo sapiens
ccatgcatcagcctgtttaccacttcctcaggttccagagtgggtcccaaacttctcatgcaatccagcgctcggataaagaagtccttgtgtaactgg

SEQ ID NO: 882100 - DNA, 99 bp, Homo sapiens
tgaacgggcatctcctcccagcagctcatgcaacatctcctctggggaaatgcagaagcttgccgggattgctgtccttgccattggactatggctccg

SEQ ID NO: 882101 - DNA, 99 bp, Homo sapiens
gaaacaccatggctgcggcggcccagctctctctgacacaggatgaacgtgaagccagagaaaatgtgaagagagagcaagatgaggcctatcgccttt

SEQ ID NO: 882102 - DNA, 99 bp, Homo sapiens
tggcatcctggacaaagatctctcggaccgcagcaatgacattgcaaatgatgtgcttgcttttggaacattggtcagtacttccaatacctacgacgg

SEQ ID NO: 882103 - DNA, 99 bp, Homo sapiens
gaagctacctgcaagctctatttttaccagatgctcttggctgtgcagagatttaccgcattgtttctcagaagcaaatgtcagacagacgcgaaaatg

SEQ ID NO: 882104 - DNA, 99 bp, Homo sapiens
gcctcccaaagtgctggtattacaggctgctgggcctttgcaacaacttctcttatgtggtgatgctgagtgccgcccacgacatccttagccacaaga

SEQ ID NO: 882105 - DNA, 99 bp, Homo sapiens
gggtgatttctgcatttccatctgagtatgctgtctggctagtcctctgggttacgtggaatgtgtttgttatctgcttctatttggaggctggggacc

SEQ ID NO: 882106 - DNA, 99 bp, Homo sapiens
cagtcctagcagcatgcagtgactatttccgggcgggctggtccgagtctctgttttggaagctcaaccagtggctgatgattcacatgtttcactgcc

SEQ ID NO: 882107 - DNA, 98 bp, Homo sapiens
aaaggagtcagggatggctcttcctcagcaacagccaactcagtttataaatccagaaacacctggctatgttggatttgcaaacctccccaatcaag

SEQ ID NO: 882108 - DNA, 99 bp, Homo sapiens
aacaacgttaccagcatccattgcaaaccttattaatctcagggaactggatgtcagcaagaatgaacccagtgacttgattgtaaaaatttacagagc

SEQ ID NO: 882109 - DNA, 99 bp, Homo sapiens
cgcgcacaatcggggcaccgagctcgcctcagttttatgaccctgtggagccagtggactttgaaggacttctgatgacacacctgaacagcctggatg

SEQ ID NO: 882110 - DNA, 99 bp, Homo sapiens
tcgcattcccaattttaggtggcagtcgcaacccatactattcggacagatggcacagaaaccgctgcgcctgagtcgtaagaaagcagtgggagttga

SEQ ID NO: 882111 - DNA, 98 bp, Homo sapiens
ctgaaacaaggtgatctggggaaccaaagactctgggactcttggtgccaacagagttactctacattgatgaatgctctgatggttttgttcaatgt

SEQ ID NO: 882112 - DNA, 99 bp, Homo sapiens
aagtcattacacaccacatgcagcgatatgcagtttggtttggaggatcaatgctggcttccacgcctaaaatgaccaatgtgtgatttcagtggaata

SEQ ID NO: 882113 - DNA, 141 bp, Homo sapiens
gggaggcggagcagagtcgactgggagcgaccgagcgggccgccgccgccgccatgaaccccgaatactggtggtaggggaccttggccctggtgggcagcagccccgcctgaaggtgctcaaaggaccactggtgatgac

SEQ ID NO: 882114 - DNA, 99 bp, Homo sapiens
gatcattctgcaagcaggcaacctgaatacagtactaaggctcgtacgtctgcatcgattatcttacgtggggcaaatgatttcatgtgtgatgagatg

SEQ ID NO: 882115 - DNA, 99 bp, Homo sapiens
tggaacagtttgaggacctcctggtgcgcatcctgctgctggctgcccttgtctcctttgtcggcatcgtggggcggacgggagctgggaagtcgtccc

SEQ ID NO: 882116 - DNA, 98 bp, Homo sapiens
tgttggaaaccctcaggagtggaagaaattgttcaaaccctgtgctgcccagagactctttcttccggtcataagcatgaagcgcagttcagtttcca

SEQ ID NO: 882117 - DNA, 100 bp, Homo sapiens
accatacatggtacagccagagtaccgaatctatgagatgaacaagatgcagtctcttgttcatctcatagattcggtactctggctgtaccatgtatgg

SEQ ID NO: 882118 - DNA, 99 bp, Homo sapiens
ctggacacccttaaagacctcatctccgactctaaccccatgggggaaggatttgaaagaacagcatgatcagaaagtatgtgagagggagatgcagcg

SEQ ID NO: 882119 - DNA, 99 bp, Homo sapiens
tatctgggcgttttagactatttcccgagctgctgtgtgtcaggactgaggcagatccagaagaactggtttttgcttggaatcagattcctcgctact

SEQ ID NO: 882120 - DNA, 99 bp, Homo sapiens
acctcatcaaattcatgaagatttagccgaggcccatggcaatgaatcgctccctggctaatgtgattcttggaggctatggcaccacttcaacagctg

SEQ ID NO: 882121 - DNA, 99 bp, Homo sapiens
gcgattatgctactcactgttcggcacggaacagtcaggtaccgcagttcagcgctgttggcccggcttcagaagaagtgtctaaatcactgcaagcaa

SEQ ID NO: 882122 - DNA, 99 bp, Homo sapiens
ggacactgcccacgactttcggatgcccctgctgagctgccagttcctgaagggtcaccgggagcagcgcctggcccacctggtcctgagcttcctcac

SEQ ID NO: 882123 - DNA, 99 bp, Homo sapiens
aagaaaggctggctgactaagcagtatgaggacggccaggtggtctttgggaagaagcttcctgcctttgccaccatccccatccaccagctgcagcat

SEQ ID NO: 882124 - DNA, 99 bp, Homo sapiens
tggaggatgtgcggggtgcgccggcagaggatccagtgttcaccatcctggccccggaagctcattaagaacactcagacttacaccttcaccatcagc

SEQ ID NO: 882125 - DNA, 99 bp, Homo sapiens
ttggtaaagaactggaagaaggaatgcgccaagactaggaaatgaagaacttcctgattacattatggtgatggtggccaacaagaaaagtcaggacca

SEQ ID NO: 882126 - DNA, 99 bp, Homo sapiens
ctcgaccccccatttccatgaactttgagactttgagaatcactacaagaaaaactccttgtggtgaaggttctaagacgtgggatcgtttccagatga

SEQ ID NO: 882127 - DNA, 98 bp, Homo sapiens
aagcactgctatgaagactgagaattgtgtggccaaagtgatggaatatgagaataggattcgagcctactccacgccagacaaaatcttccgatatt

SEQ ID NO: 882128 - DNA, 99 bp, Homo sapiens
cgaaagctttcctaggccaaaaagaggggggacacagcgattgccacgcgccattggaatgtccctggccaaggagctcatattctctgcgcgagtcct

SEQ ID NO: 882129 - DNA, 99 bp, Homo sapiens
agaagtccagagctgaggactgcctgtttgcagatgtcatcttgcagtttagtaggaccagagctccatgggggcaggtacctgggtggaatctctcct

SEQ ID NO: 882130 - DNA, 98 bp, Homo sapiens
cccgatctacggggctgacatcagcggctctttgtatgatgacggagaagcagaatttgcccgcatcatgagcattgtggaccccaaccgcctggggg

SEQ ID NO: 882131 - DNA, 98 bp, Homo sapiens
gcaagagcagtttactgttgcgttttgcagacaacactttctcaggacagtcattttgtttactcattcagccctgttgcaggtcccaataaactctt

SEQ ID NO: 882132 - DNA, 99 bp, Homo sapiens
cttcagggtcttgagattgagctgcagtcacagctgagcatgcggtgaccacccgtcaggtgcgtaccattgtggaagaggtccaggatggcaaggtca

SEQ ID NO: 882133 - DNA, 99 bp, Homo sapiens
acaattcggctggactgtttcactcattgccttatagttaagtgtacagcagatattttgtaatccttcccctctaccaccggatatggctcctgggca

SEQ ID NO: 882134 - DNA, 99 bp, Homo sapiens
tggagacctgtcgcttcgtagcaagtcactctgactgctgagacctcatgtagctacatttcctggccccggaaaagtctccatcttcttctgaccaaa

SEQ ID NO: 882135 - DNA, 99 bp, Homo sapiens
ggaaggctgtcggatcgggggcccagggtgtccgagtgaactgggtgattcagagactcgctctttactgagcgtgtttgaagaagatgctggcaccct

SEQ ID NO: 882136 - DNA, 99 bp, Homo sapiens
tgcactgggtgattcacgtgtgcccaggccctgaggtgggccggacctgggagtggcagtattggcataaaggatgtttccattgtgaggtctgcaaga

SEQ ID NO: 882137 - DNA, 99 bp, Homo sapiens
gggctcaatgtgcacaccaccaccggcaccctgcgcccagggtacacgtgcgggtagtactcgtaataaagatctggctgatcaagatttccgaagggt

SEQ ID NO: 882138 - DNA, 99 bp, Homo sapiens
gagactgcaggctacctcaggggccgtccccaggacactgtccggatcttccctccctgtggtgctgattactatgattacggacatggactcagtgag

SEQ ID NO: 882139 - DNA, 99 bp, Homo sapiens
tcaacatgaacaactacaaaggctatgaaaagaagccctattgtaatgcggaggacatgtatgcccaggactctatagagctactaacaacatctggta

SEQ ID NO: 882140 - DNA, 98 bp, Homo sapiens
gaccagaagggccaggtgcatcagtgcagaggcaaatttctggagatgtgcaatgatctcttagctagagtggagccaccacttcgtagtgttttgga

SEQ ID NO: 882141 - DNA, 99 bp, Homo sapiens
tcaggccatgcactgttacttaaaggaacctaagtgctcaagtaaagctctttgtgacagggcttttcagcttaaatcaagatattcctgctttcaagg

SEQ ID NO: 882142 - DNA, 99 bp, Homo sapiens
agaacaccagccttgcacctgaagaccccacctttcctggagctttgcccaggtgctggaactctccgcagaggcaagcaaagaggcagccttggcaaa

SEQ ID NO: 882143 - DNA, 99 bp, Homo sapiens
gtggctcgggctcgggcggagctggagacgtgtggagctgttcgaggactcgcgggtgtgcaggtactccaaagattcaggtttactcacgtcatccag

SEQ ID NO: 882144 - DNA, 99 bp, Homo sapiens
aggaaacagtagcaccaggtaagagtaagtccatactggataaatttcattgaagactttggcaatctgcagcaacacaatgcagtgtttaattgattc

SEQ ID NO: 882145 - DNA, 99 bp, Homo sapiens
atgagcggaggctgctctattacaagaacccactgttcttttagaactcatcaaattgaagctgttccaaccagctctgcaagtgatggatttaaggca

SEQ ID NO: 882146 - DNA, 99 bp, Homo sapiens
caaagtgctgggactacaggcataaacattgacgatcttgaggatgaccctgtggtgaacggggagaggtctggctgtgcgctcacagacgctgtggca

SEQ ID NO: 882147 - DNA, 99 bp, Homo sapiens
ccagaaacaatttggggttaggcagaaatgggatcagaaatcacaggctccttctcctgaaaaagccgaggaggagagtgagaggcttctgagggaact

SEQ ID NO: 882148 - DNA, 99 bp, Homo sapiens
tgcagggcctgggccgccgctgctacctgcagcgccgtgtggcacgacacaaaaatcagcagctaccaagggggtgccagctggaaacagtgacacaga

SEQ ID NO: 882149 - DNA, 99 bp, Homo sapiens
gccgcctggcggccatcgtggctaaacaggtggcccagagtggcgagatccccccatcttgctgcaacttccccgtggctgtgtgccgggacaagatgt

SEQ ID NO: 882150 - DNA, 99 bp, Homo sapiens
tgaaattgacgatgagtcggcctccttcactgtcaccgtcacaggactccatccccgtgtctacctccctccttggagacacttccgacacgacctcta

SEQ ID NO: 882151 - DNA, 98 bp, Homo sapiens
ccgccgccgccgcctggccgctatggatctattcgactttttcagagactgggacttggagcagcagtgtttgcatttatgtcggatcctcagtgaaa

SEQ ID NO: 882152 - DNA, 99 bp, Homo sapiens
cgattgtattgcaggttctgtcactgtgccgctcaagtggaaacctccaacaaatgcatctccagctccattggtatcaataatttctttctggtcttg

SEQ ID NO: 882153 - DNA, 99 bp, Homo sapiens
tgaaaacaaccagcctatctcagggatccttctaaagtaaatattctggtacctggtgctggactaggaagactggcctgggaaatagctatgctaggt

SEQ ID NO: 882154 - DNA, 99 bp, Homo sapiens
caggctttaggaactgaagaggagaggcagatgcgaaccagaacaatgggacctcctctcaggacacagcggtgactgactccaagcgcacagcggacc

SEQ ID NO: 882155 - DNA, 99 bp, Homo sapiens
agcctcatcattggttatgccagagtgcctggaagagctgggatgtctggttgagtcctatggcatgaatgtttgccaaccaaccccaggaaaagcctt

SEQ ID NO: 882156 - DNA, 99 bp, Homo sapiens
caggaatggacgctgagtcgatctgtcccggagctcaaagtgattgcggaagcatgagaagattctgtaactgagaggcattcttcaagctgctggaaa

SEQ ID NO: 882157 - DNA, 99 bp, Homo sapiens
agcagcggaaaatgatccagtcacaggaaggatcagaatgttctctctccagtcaactgctggaatctcctcttaaaccaggtgaagcgggaaagcagg

SEQ ID NO: 882158 - DNA, 98 bp, Homo sapiens
ttctgaggggtctggagggaaactgacagctgtggatcctgaaacaaacatgaatgtgttgtgctgaaagacattatgacaccgccaaatttaattgc

SEQ ID NO: 882159 - DNA, 99 bp, Homo sapiens
ccttagaactctatggagttgaattccactatgcaaggtccacagtttggaaagagttgctgttagcaaccatcggggaacagttcacagactgtgccg

SEQ ID NO: 882160 - DNA, 99 bp, Homo sapiens
tgcaacagggctgaatgagtaaacaaaatgactgtccttaacagtactgcagtgcaaacctttggccataagaatataaaccaaatctcttgttaaatt

SEQ ID NO: 882161 - DNA, 142 bp, Homo sapiens
agggagacaaagcagcgcccgtctgcttcgggcctctggaatttagcgtggaacagctgctcggccagcaagaagcctccatgcagaatagtcatttcttcacagatgttcaagggtcctgcggctagctgggcgagcgcta

SEQ ID NO: 882162 - DNA, 99 bp, Homo sapiens
ggccaacgtggtgaaaccccgtctctagctccgtccccgtacaccttgatggtgttcacacagttcttgacccagcccctgctctggaggaaggggctg

SEQ ID NO: 882163 - DNA, 99 bp, Homo sapiens
cccaaggtccaccgagcccgcaaaaccatgtccaaaccaggaaatggacaggatgagaacaagttgagcagtgccaacggccatgaagaacgtagcaaa

SEQ ID NO: 882164 - DNA, 99 bp, Homo sapiens
agacgtgattatgagggagtttcgttctggctctagcagagttttgattaccactgacctgctggtttcccttgggggctttgaaataacaccaccagt

SEQ ID NO: 882165 - DNA, 98 bp, Homo sapiens
atttcacatcgaatccagcctcaaacacagagattgactggaaggcctacatggccgaggtagaaggcgtcatcaatggtacctatgactatacccaa

SEQ ID NO: 882166 - DNA, 99 bp, Homo sapiens
ctgattatgtcaagccagctgctactttccaacagagaaaaccattttatatctgtgtcccaaaattcagtactgttatttccacattgatgatttcat

SEQ ID NO: 882167 - DNA, 99 bp, Homo sapiens
agccaagatgctgcggaatctgctggcatttataagacgctgtttggcatatcgaaaagaagatcgatttgatgtgcaccagctggcaaatgacccata

SEQ ID NO: 882168 - DNA, 99 bp, Homo sapiens
gacaagactgtatgatagtgttagttccacagatggggaggacagtctagagagaaaggactggagtccagagttgccaccagatgggatattcaaaaa

SEQ ID NO: 882169 - DNA, 99 bp, Homo sapiens
tccagacggctgaggcactgggtgtgccctatgaacagtggaaggtcctcaacgagatcgatgcgatcaaatttggaccccttcaaccagtacactgaa

SEQ ID NO: 882170 - DNA, 99 bp, Homo sapiens
ggggcgctgactgcgtgttaacatcaggccagaagaatgtttgaaggtgagatggcaagtttaactgccatcctgaaaacaaacacggtgaaagtgccc

SEQ ID NO: 882171 - DNA, 99 bp, Homo sapiens
gtgtgcaaccattggcgtggatccgctggcctgccagattacctgtccctaatactgagcagaagctggtgaatgaaacaggagatccctcagtcaaaa

SEQ ID NO: 882172 - DNA, 99 bp, Homo sapiens
gattaaagaagcttccatctgctgtgattgctttgcagaggagtttcagtagagacggggtttcaccgtgttagccaggatggtctcgatctcctgacc

SEQ ID NO: 882173 - DNA, 98 bp, Homo sapiens
cggaaggagagctgcatgatctgattgcagaggtttcccaggcagctgcagacttgaaacagttctgtctgcagaatgctcaacatgaccctctgctg

SEQ ID NO: 882174 - DNA, 99 bp, Homo sapiens
aagtctgctcaaatctcctgctgtgaaccagcagaatttttgaacaggtttgcgaggagcgatcgcatttgccttagctattcggaacacagaatctca

SEQ ID NO: 882175 - DNA, 98 bp, Homo sapiens
tccacaaatgttcagaaagaaggacagggatcacaaacactcagagtggaaaaagtaccatcatttgaaacagtgctaggaaaagaatgtcagtgatt

SEQ ID NO: 882176 - DNA, 98 bp, Homo sapiens
tacataccaatttgtcttaaccacagaaattgcccttttggaaagtattggcttccatgcctatggctgttctaaaattgggccaaatatatccattt

SEQ ID NO: 882177 - DNA, 99 bp, Homo sapiens
gccacaacgatgctgtcacacggctgggcactcccgccgcccaccttcctctgcgatcttgtcttgaacctggcaggtgaaagaggagtaggaggaaac

SEQ ID NO: 882178 - DNA, 99 bp, Homo sapiens
tcaagtggacttggccatgattggttggagaccagtgtaaatttgatcatgatgcagagatagaaaagaaaaaggaaatgtgtaagttttatgtacaag

SEQ ID NO: 882179 - DNA, 101 bp, Homo sapiens
cttgtttgttcttctccaggggacggggagaccagcagagccgtccaggcaggagaggggccctgtggaggggccgcctttccttctcctccaccacagga

SEQ ID NO: 882180 - DNA, 99 bp, Homo sapiens
ctcttcctctggcccgaagccttcctttatcgctttcagaaagcaaggagatggccaccaaggagaagctgcagtgtctgaaagatttccacaaggaca

SEQ ID NO: 882181 - DNA, 99 bp, Homo sapiens
gccactgcaagtctataaagaacacgctcaggagactattgggaagaagttacctgcaactacagcaactccagactcatcaaaaacagaaatggacag

SEQ ID NO: 882182 - DNA, 98 bp, Homo sapiens
acgattttcccgagagttcacagactttattacaactaccacctgctatggtagaagagggtgaggaagttcaaaatcaagaaacagaattggaaaca

SEQ ID NO: 882183 - DNA, 98 bp, Homo sapiens
ttctcattccagtcctttcgcccacgcagggaacgatgcctctggaggtggtggtggagctgcagatccgggcgtgaataaccctataccttccaatt

SEQ ID NO: 882184 - DNA, 99 bp, Homo sapiens
aaatcagcaagagctttctggaagaaaggaaatgttaggatcactttattctggtattttgattccgttcaagctaaagaacagcgaaggcaacagaga

SEQ ID NO: 882185 - DNA, 99 bp, Homo sapiens
ctgagccatggttttgagatatgaaagagatgaccagtccttcctttggagtcctctttagaaaagaggcagttcctgtagtcccagctactcaggagg

SEQ ID NO: 882186 - DNA, 100 bp, Homo sapiens
actcaggcaccctggtgcccagccgggaactccccatcgcgttttgtatcgctggcaaaacgcgatggggagttcccggctgggcaccagggtgcctgag

SEQ ID NO: 882187 - DNA, 99 bp, Homo sapiens
ggagggatcacatactctgaagtgcgttgtgcttatgaagtttctcaggcacataaatcctgtgaagttattattggctggagtggaatggcgcaatct

SEQ ID NO: 882188 - DNA, 99 bp, Homo sapiens
aaactatggctaaattacatattccagtaatggtggatgaagttgttcattgtttgtcaccacaaaaaggacaggtgtgttccagagaacaagccttca

SEQ ID NO: 882189 - DNA, 99 bp, Homo sapiens
tggatgtagatacgttagccagtttacttagtggctgactgttcttgggatgaaacaataaagatctatgaccctgcttgtcttactattcctgcttga

SEQ ID NO: 882190 - DNA, 99 bp, Homo sapiens
gtttcagttcatcctgcttcttcttctcttctgctgctatcctcctctcctcttctgcccgaggttttaggtaatctgtccagtcaagtggatcctccc

SEQ ID NO: 882191 - DNA, 99 bp, Homo sapiens
ctgtaattccctcctctgaagctggctttccaatcttggtcttgttctcaccatcacatatttaacagcacttataaactggttgtggaaaagcagatg

SEQ ID NO: 882192 - DNA, 99 bp, Homo sapiens
gcctcagggtcatgattacacatggtgtggatgtgacagcccaagatactaccggtggtctgtttttctggggggccaccaacacctcccgtgaatcta

SEQ ID NO: 882193 - DNA, 99 bp, Homo sapiens
ggtactgaagatgcactgttaaaaaaccaaagacgggcgcaaagattgcttgaagaaatccatgccatgaaggaacatcatcttcagcgggctatttca

SEQ ID NO: 882194 - DNA, 99 bp, Homo sapiens
ataccaagtggatagtagaacttatctactggatttccgtagtattgatggggcactatgaacgaagaggagcagtttgtaaacattgatttgaatgat

SEQ ID NO: 882195 - DNA, 99 bp, Homo sapiens
cccaggttgccttggaaaatgccaacgccgtgtctgaagcccgagctacactggaaatcctcatccctgactttgttaaacagacctctgaagagaagc

SEQ ID NO: 882196 - DNA, 99 bp, Homo sapiens
gatgaagatgcacatgtctgggaggataattgggatgatgacaatgtagaggatgacttctctaatcagttacggaaacaaatggaagactgctgcgac

SEQ ID NO: 882197 - DNA, 99 bp, Homo sapiens
attttggggcagaatacagagatatggaatcagccctcgagcatgttccaaactcggttcgcttgtggaaagcagccgttgagctggaagaacctgaag

SEQ ID NO: 882198 - DNA, 98 bp, Homo sapiens
acgcggcgatatggaagaggagggcaagaagggcaagaagccacatgaaatgaagatcacctctgcctatctacaggacattgagaatgcctataaga

SEQ ID NO: 882199 - DNA, 99 bp, Homo sapiens
ttccaggcgcacactagtctacaaggccagagctttctggaagggggcagctgaactccagtgcacccagttagacttggagcggaaactcaagttgaa

SEQ ID NO: 882200 - DNA, 98 bp, Homo sapiens
gacgacgtccttctggaagaggcgaaactggtgaaattgcactactgatgaatcgtcctcgtgctgccacagttgttgctcgtggccccttgaagtgc

SEQ ID NO: 882201 - DNA, 99 bp, Homo sapiens
ctatatcagcccattctgctctgtccctgcagcaggtaaactcgaatcatgtagacaaagctcaggcccagtgtcacgacccatcgcacagccgtgtag

SEQ ID NO: 882202 - DNA, 99 bp, Homo sapiens
cttctataaccacccggtgcactttgtcttccatgacaccaagttggatgccatgctggaggagttcaagaaggggaataaccagcaagtacctgtcaa

SEQ ID NO: 882203 - DNA, 98 bp, Homo sapiens
gcggatttacgacattaccaatgttttggaagtgggtgaggctggaggacccccacgggaagccatacttctacaatccagaggactcctctgttcga

SEQ ID NO: 882204 - DNA, 100 bp, Homo sapiens
actctcttcggacctacgacatcgcggcttctctggagtttggtcctgtggctgactggccaacgccagagaagccgcgatgtcgtaggtccgaagagag

SEQ ID NO: 882205 - DNA, 99 bp, Homo sapiens
agctcttcatgcaaggaaacataagttggaggttctggaatctcaggaagaatcctgtaagtacaatcccaagtattctgttgctaatgacaccggctt

SEQ ID NO: 882206 - DNA, 99 bp, Homo sapiens
aatatttgtaggcgggttatctgcgaacacagtagtggaagatgtaaagcaatatttcgagcagtttggcaagtgatcctgccatgaagcagtttctgc

SEQ ID NO: 882207 - DNA, 99 bp, Homo sapiens
tttcagctatcttcccatccaatacttggtgactggtctattcaagttcaagtgaataatgtgacagtgatgataacatgggtgccaaaaatacttcaa

SEQ ID NO: 882208 - DNA, 98 bp, Homo sapiens
cagaccgtcgggaacagccatgcaaaggcaggggaggaagccacctcgagcttttcatgcaacacccaacacttataagcggaagaacacagaaacag

SEQ ID NO: 882209 - DNA, 99 bp, Homo sapiens
ctggaatctaaagcctcctcagccttctgagtcagcctgaaaggaacaggccgaactgctgtatgggctctgtgtggaatatcaaacaaatgattaagt

SEQ ID NO: 882210 - DNA, 99 bp, Homo sapiens
tgtccgccaggattggaatacttaagtcaggtgtggtacccacagcccctgaacagcctgcaggtgaaatggaaaatcaaacaaaaccaccagatccaa

SEQ ID NO: 882211 - DNA, 99 bp, Homo sapiens
tggttgtaacactctacaagatgggttttccggaagccgccagaacccagacctggactcagaggcgctgctagccctgcccctgcctcagctggtgca

SEQ ID NO: 882212 - DNA, 99 bp, Homo sapiens
agctctcctgccacagctcctcaccccctgaaaatgttcgcctgctccaagtttgtctccactccctccttggttggaaagggcaaagaaattacaaga

SEQ ID NO: 882213 - DNA, 99 bp, Homo sapiens
agagatcaggccaagtttggaatcactgggcattcagctcagtgagtacttaccggaggtgaaagacctgctacaagcggatcagcttggaagcttaaa

SEQ ID NO: 882214 - DNA, 99 bp, Homo sapiens
gagccgccagcgcgtttggctgtgacctgacggagtatctggaaagctcgggacaggatggaggactcagagagagtaatgataattaccggaccaaac

SEQ ID NO: 882215 - DNA, 99 bp, Homo sapiens
atacatctcaatactttttcataacaccaaagaaacaggaccttgccctgtcactcaggatggagttcagtggtcctatcatggctcattatagcctca

SEQ ID NO: 882216 - DNA, 99 bp, Homo sapiens
cttcgcgattacactggatcagaaacaggccatggagggacaggatccggaggcgccagctcaaccggggcttgtacatgacagctggaatagcctcca

SEQ ID NO: 882217 - DNA, 99 bp, Homo sapiens
accaatggagatctgcctcaatggaacccctgctctggcctacctggcgagtggaatgttggctgtccgtgaaaaccgctacattgtcctggccaagga

SEQ ID NO: 882218 - DNA, 99 bp, Homo sapiens
ccctggggatggcgcatcacacaccaaagatctgacaggatggcatctgatgactttgacatagtgattgaggccatgctggaagctccctataaaaaa

SEQ ID NO: 882219 - DNA, 98 bp, Homo sapiens
agtgttgcatagacttgtcccagcaagaccacaaatttattcaagtcaattaccatcctttaccaggagtgatagattcgtgtggcctttcaaatgat

SEQ ID NO: 882220 - DNA, 99 bp, Homo sapiens
atttgccatccgagggatgctgaaaacctttgggcttcatggagtcgtcttagatgttgattcagttcaacagagtttggaaaagatttctaaactgga

SEQ ID NO: 882221 - DNA, 99 bp, Homo sapiens
tgtaatccggatccaggatggtactgaggcggggtttcaccatgttgcccagactggtcttgaactcctgagcttaagcaatccacctgcctcggcctc

SEQ ID NO: 882222 - DNA, 99 bp, Homo sapiens
gcgcgtcttctggagcaatgggaggtggaagtgatcaagaaagcctacatgcaaggtgaagtggaatttgaggatggagaaaacggtgaggatggggcg

SEQ ID NO: 882223 - DNA, 99 bp, Homo sapiens
gcgcgggcccaggagcggcaggactcgggccggagcgtggccggacccccacccgccgaggggcccagggaggacgcggaacccggtttggggccatgc

SEQ ID NO: 882224 - DNA, 99 bp, Homo sapiens
atggtaaatgctggagcaattgttgtgacttcactaataaagctggagaccatggccaaaatggaggtgaaaacctcacttctggacaatatgattgga

SEQ ID NO: 882225 - DNA, 98 bp, Homo sapiens
ggacgtggctgtcaaacgcctgataccaattgatgaatactgtaagttcacagacattgggaccttcgagacagtgtggcaagtcaagttctacaatt

SEQ ID NO: 882226 - DNA, 99 bp, Homo sapiens
gtaaaaactgcagcatccagcgtggacttaagaagcagcagtgttgtactgctacttctataaacggacagccgtaagactaggcgatcctcacttcta

SEQ ID NO: 882227 - DNA, 98 bp, Homo sapiens
tgagaacctcctctcccacttcttgccccagaaagccccagacggaaagagctacttgctgacattccttctgcagcacttgatttattggaccacat

SEQ ID NO: 882228 - DNA, 98 bp, Homo sapiens
caacagcctctaatatggagtatatgaatcttgcctcctggaatccttcaaatcctgaatgtctcttacttgtggtgaaggaacttgtgcaacaatat

SEQ ID NO: 882229 - DNA, 99 bp, Homo sapiens
gcaacctcaccaatgcagagaaccgcccacttcgatgtgttgttcttgtcgcacttagggacatcaatcaaggagaagagcttttttcaaactactaca

SEQ ID NO: 882230 - DNA, 98 bp, Homo sapiens
ggcccggagcgtcttggctgccgccctgctccacgcagtctgcttcagtgcagtgaagtttgacggtgagaacatgtatatgagcatgacagagccga

SEQ ID NO: 882231 - DNA, 99 bp, Homo sapiens
tccttccttactttgtcttggtatactacatggcaaaatgggaaaggcacctctgtgggcatatattgcttgtgcctgtggccttttcatttaccagtc

SEQ ID NO: 882232 - DNA, 99 bp, Homo sapiens
tatgaacgccttgttgcccagttccccagttctggcagattctggaaactgtacattgaagcagagtttcgagaggcccgtgccatgagaccgcctggg

SEQ ID NO: 882233 - DNA, 98 bp, Homo sapiens
aatcaatgcagcattaggaaggcttcattcagctcagcaccaccttggggtcctaacctgattataaaacaaccagatgagttgctggacagcatgtc

SEQ ID NO: 882234 - DNA, 99 bp, Homo sapiens
gctctttctgctgggcctgcccttcaccctctacatgctactctccagagagaccggatcttcaaacattttaccaggaagcgccaaagggctatgcga

SEQ ID NO: 882235 - DNA, 99 bp, Homo sapiens
ctttgtataatattgattgaatagctgcctcagtatcttctttagctaaaaccttgtgtgcatggcctttgacatcaaagaagattgtgaggttatggt

SEQ ID NO: 882236 - DNA, 98 bp, Homo sapiens
aggaccggggcgaggtgacctttgagaagatcttttcccagaagctgggcgaggccccttccaaaacacttgttgagacagccaaggaagccaaggag

SEQ ID NO: 882237 - DNA, 99 bp, Homo sapiens
agaggagatccggatgctcatccataaaactgaagatgtgaatactctgataggaaccaaggctttagccttctcaactcattgactggaacaaaccat

SEQ ID NO: 882238 - DNA, 99 bp, Homo sapiens
tgtaaccaaggacttccaccaaagtcagtcccacgatgatgatggtcagccagagtattgataacctcggagaattctttcctcatggcaacgaagaaa

SEQ ID NO: 882239 - DNA, 99 bp, Homo sapiens
gagagggagagactggagaaggacctggaggaagcccatcgagagaagagcaaaggagactgcaccatccgtcaccagtatgcatgagcgggtgaaccg

SEQ ID NO: 882240 - DNA, 99 bp, Homo sapiens
tgaagagatgcattgaatacctgatgcttatttgtgtgattctgaacaggtgctggcggtaaagccatatctggtactttcatagttcttttggctctt

SEQ ID NO: 882241 - DNA, 99 bp, Homo sapiens
tattggaaaaacctcaaaatatgatggtggttggacagtcagcatttgcagactttgttggttgaagccatggataacagaacccacagatgcagaggg

SEQ ID NO: 882242 - DNA, 99 bp, Homo sapiens
cattagattcgctggctgttatgatcagcacaaccttgttgcatgccagataaatgatcaggacagtgattgttcatggatttacccttggagaaaagg

SEQ ID NO: 882243 - DNA, 98 bp, Homo sapiens
ctttctccccagccaagagcatggctatgggagaaggaaggcaggcagcaggcaggaaatggatcagacaatggctgccaatgctcagaagaataaat

SEQ ID NO: 882244 - DNA, 99 bp, Homo sapiens
ctcctgagtagctgggattacaggttaaaaagatcaagtggcatgagcagccttttggggaaaattggtgccaagaagcagaaaatgagcacccttgag

SEQ ID NO: 882245 - DNA, 99 bp, Homo sapiens
ggcatcttacagactatttcaccttcaaacaggaatgtcgagtttgagtggctgaggcagttttggtttcaaggcaatcgatacagaaagtgcactgac

SEQ ID NO: 882246 - DNA, 99 bp, Homo sapiens
agggagtgcatcaaaggtgtgaacacagagtctccgggaccattatggcagtcaagtggacgggtgggcattcttctcctgtcctctgcctgaatgcaa

SEQ ID NO: 882247 - DNA, 98 bp, Homo sapiens
ggagggagaggctgcagagcgagggcaggagtttcaccagtgatcattaaagaatgggcagcttacaaaggaaagtctcctcaaaccccggaactggt

SEQ ID NO: 882248 - DNA, 98 bp, Homo sapiens
tgggaacctagctgatgataggggggttccatctcccaacttgtccatagtggttaagaaagtagctcaatacatggctgatgtattggaagatagca

SEQ ID NO: 882249 - DNA, 99 bp, Homo sapiens
tgaaatcgaagtcatgcttgatggaccatgcagaggagggcagggctagcatttacaaatcagtcttttccaactcttccaaagagatgatgtgtttcc

SEQ ID NO: 882250 - DNA, 139 bp, Homo sapiens
cttacaggacagcagatggggaattcatggctgttggagcaatagaaccccagttcggactggacccaccacgtggtattctggcaggcccttgataaaatgctctttgatcagcagctcgtagaactggggttctatt

SEQ ID NO: 882251 - DNA, 99 bp, Homo sapiens
tggagataatctatgccatcaaccagcggcacctggacggtttggattcaggatttgttcctagtgtccaagattttgataagaaacttacagaagctg

SEQ ID NO: 882252 - DNA, 99 bp, Homo sapiens
cgactatttggcaagaagcagatgcgcattttgatgggctagcatcccattctctgtggttggatccaatcagttgattgaagccaaaggaaagaaggt

SEQ ID NO: 882253 - DNA, 99 bp, Homo sapiens
aggccagctcgaagaaggcgagcagggtgcgggagagccccttgcagaagacgccgtacgagatttgaacatggaattcaatccttcagatcatcctcg

SEQ ID NO: 882254 - DNA, 99 bp, Homo sapiens
gactgaggagaccctgctgctttgggaggatttctcaggctatgccatggcagctgcagaggcccagggagaggggactcgggcaagggtgccgaagat

SEQ ID NO: 882255 - DNA, 98 bp, Homo sapiens
tggaaggggcagtacaagcttacgtctctgctcttcagtacaatcctgaacgtcaaggtcgtgggaaataaaaggcagttctacacagactgcagcaa

SEQ ID NO: 882256 - DNA, 98 bp, Homo sapiens
aggacccccagccaaacagagagaccttgaaggggcagtcagtagtgagggccccaaggctgttgcagctcctcgacctgatcggttggtcaatcgct

SEQ ID NO: 882257 - DNA, 99 bp, Homo sapiens
gtggaggaagatgctttgctctgtggacccgtgagcaagcataagctgccaaaccaaggattcactccttctccagttgcacagccacacccttcagct

SEQ ID NO: 882258 - DNA, 127 bp, Homo sapiens
tgggacttgcagcctatggatacggcattcggtatgaatatgggattttcaatcagaagatccgagatggatggcaggctatctttgtcacgagtgaattgttctcagtttctcggtttatgtgctc

SEQ ID NO: 882259 - DNA, 99 bp, Homo sapiens
gggcttcctggtttacctggcactcctggacaggatggattgccagggcttcctggcccgaaaggagagcctctgcaggtggagctggagcaagaatac

SEQ ID NO: 882260 - DNA, 99 bp, Homo sapiens
ggcgttcaagcgaaaacatgaccgctgagcccatgagaggctgacccgcggctgattgagtccctctcccagatgctgtccatgggcttctctgatgaa

SEQ ID NO: 882261 - DNA, 98 bp, Homo sapiens
tcatttctctcacctctcatctttggaacgggagatgactttttgcattgaaacggttacgggcaggacttgagtggcttcggacagggcttctcaga

SEQ ID NO: 882262 - DNA, 99 bp, Homo sapiens
tttcaccagagtttcatgaacatttcaataaattgatggccagacctgcagttgctctacactttcagggcaagtgtccagagaatggctgggatgaaa

SEQ ID NO: 882263 - DNA, 98 bp, Homo sapiens
agggagataagggagagccaggttattcagaaggtacaaggccaggaccaccgggaccaacggataccatacttgcagagctccttcagatacataaa

SEQ ID NO: 882264 - DNA, 99 bp, Homo sapiens
tgaacctgtgtgggaggaaaacttcactttcttcattcacaatcccaagcgccaggaccttgaagttgagctatttgatggcattgaatgtgaatttcc

SEQ ID NO: 882265 - DNA, 99 bp, Homo sapiens
cagaagaaggccagctttgaggaagttctaaatggagcccctggatttataaacttgtgcgatgctttgaacgcctggcagctggtgaaggaactcaag

SEQ ID NO: 882266 - DNA, 99 bp, Homo sapiens
cagaacaaagcattgccagaaaacgttaagggctaagttctaaaaacatcagttcatctccaagcgttgagagtttgcctggaggaagagaattcactg

SEQ ID NO: 882267 - DNA, 99 bp, Homo sapiens
agaaagtaacagtgagatagagcagtgattcgcctttgccagtctcatctcgtgtctgctttgttaagttccatgatccagactcagcagttgtggcac

SEQ ID NO: 882268 - DNA, 99 bp, Homo sapiens
tgaggccccaggcatcagagatcatgagagcaaagtacccacgtttgttcgaatgctggccccagagggagccctgaatatacacgagaaagcctggaa

SEQ ID NO: 882269 - DNA, 99 bp, Homo sapiens
ctggaggaagcccatcgagagaagagcaaaggagactgcaccatccgtatgaatcagaactccttacggttcctgatggttggaaggaaccagcttttt

SEQ ID NO: 882270 - DNA, 98 bp, Homo sapiens
acctgtctggagcaagaaaaagagcctttgactgtgaagagacatgagatggtgaatgaacccccaggtggatctccttacgtagcagccaaaataaa

SEQ ID NO: 882271 - DNA, 99 bp, Homo sapiens
tattttctagtgctgagatcctgagacaatggtggtggttgtccaggccatcagtgccctgtgtcagaaatatcctcgcaaacacgccgtccttatgaa

SEQ ID NO: 882272 - DNA, 99 bp, Homo sapiens
tgctgaacagttggagaagatctatgggtcagacagaattcagagtcacctgatatgaaaaaggagcaagacccccctgccaagtgccacaccaaaaag

SEQ ID NO: 882273 - DNA, 99 bp, Homo sapiens
cgggcgctctcgcttcagtcagtcgggccgcgccgcgcctcagctctgaggatgtactgagtaaagatgctggggaatgtgcaatatgccttgaagaat

SEQ ID NO: 882274 - DNA, 98 bp, Homo sapiens
tttttcctgtcgtacgtgggacaggccacgctgtccgtccgcagtaccgacgcctgcagtcaggatggctaaaggtgaccccaagaaaccaaagggca

SEQ ID NO: 882275 - DNA, 99 bp, Homo sapiens
gccagctcgaagaaggcgagcagggtgcgggagagccccttgcagaagacgccgtacgagacccaacatgagtgaagtttcctgcaagaaacgggacga

SEQ ID NO: 882276 - DNA, 99 bp, Homo sapiens
gtacaagattcggtaaggagcgacccgggcgctggagtccaacacaacatcaagggtacccaccagcaggcaatcaggaggcatcttttccataaatat

SEQ ID NO: 882277 - DNA, 98 bp, Homo sapiens
attctcttcactcgagagatgaggacactgaaattcagagaggggaagtgatttgcctcagcttgtactgatcattttacttctccagatgaatatga

SEQ ID NO: 882278 - DNA, 99 bp, Homo sapiens
tacaacaagttcatctcagccacaggcccaagagctcccagctcccactcccagcagcaggcactgcgagcaagactggccgccggattccagcgagga

SEQ ID NO: 882279 - DNA, 98 bp, Homo sapiens
aggcactcagctcaaatacacacacctgttgccattatagagctggaattaggcaaatatggacagcaaagaatggctcaagaagtactgacacattt

SEQ ID NO: 882280 - DNA, 99 bp, Homo sapiens
agacagctcagaagttccatagaacgggttattaacatatttcagagcaacctctttcaggctttaataggcaatggtggcttgctatccgggaaatgg

SEQ ID NO: 882281 - DNA, 99 bp, Homo sapiens
gagacgtgtcgtcactatgtggcccatgtgaagaaccatatttatttagagtcagaatggagcgatttgtagtaacagcaccacctgctcgaaaccgtt

SEQ ID NO: 882282 - DNA, 99 bp, Homo sapiens
gacagagtgtttcacatttgctgccatgagcaaagaggaggtcgacaggctatagaaagcgcaattggtggtaacgcttatcaacacagcaaagtgaac

SEQ ID NO: 882283 - DNA, 99 bp, Homo sapiens
tctattatagcaaagaagaaagataatttcattgagccatcctgttttacaggtgttccactgtgtccactttgagtgtccagagcagcagagcagcca

SEQ ID NO: 882284 - DNA, 98 bp, Homo sapiens
tacaggttttgacacaagaacagttggccaatactggtgcccaagcctggattaaaaaggtgcaatgaagggcgtgttggtagacattgtgaatgcag

SEQ ID NO: 882285 - DNA, 99 bp, Homo sapiens
gctttcaacccccacctcagcccagcaattcgggacacagcaggtcaggagagattcaacagcattacctcagcttattacagaagtgccaaggggatc

SEQ ID NO: 882286 - DNA, 99 bp, Homo sapiens
cggagcccctttagccatgtggatacctacggagcacgagaaatacggcgtgggtcccagcacacctggaaagttctgcaaggcctcagctacagaaag

SEQ ID NO: 882287 - DNA, 99 bp, Homo sapiens
aaagttcttccagtcctcctaggcatcttattgatcctccagtcgaggaagaaatgcagagtaacgtggaagtggtccacacctaccgccagcacattg

SEQ ID NO: 882288 - DNA, 99 bp, Homo sapiens
ctgatcggctgtatgactccatgaagtcaccttcaggccattcagaggaggaaagagaggggaatatgaagtcagccaagccccaagtgaaccacagtc

SEQ ID NO: 882289 - DNA, 99 bp, Homo sapiens
ggataagcctcgacttagaagctaccgagttaccctaagaaaggttgggataattcttcactattccacccttgccacagtactatgggtaggagtgac

SEQ ID NO: 882290 - DNA, 99 bp, Homo sapiens
ggtgcctcccttcgttgatctgacacggatgataccatcggggaccttaagaagctgattgcagcccaaactggtacccgttggaacaagattgtcctg

SEQ ID NO: 882291 - DNA, 98 bp, Homo sapiens
ccagtccctgagagagctcatctcagatctggagcatcggctgcaggggtcagtgatggagctgcttcagggcagcaaggagcgcttccactggcaga

SEQ ID NO: 882292 - DNA, 99 bp, Homo sapiens
tgccagaactcaccgccagagcctggatacattaattgtttggtcagaagcagagaactatgatttggctctgagttttcaggagaaagctggctgtga

SEQ ID NO: 882293 - DNA, 98 bp, Homo sapiens
gcagaagtggaaggagcagaacgtgagggtgtaacttacaaaaagacacgaagatcgattgagaagttattagaatgggaaaacaataggttatacca

SEQ ID NO: 882294 - DNA, 99 bp, Homo sapiens
gccggcctgcggcggagggaaaaaggaagaggagaaggaaattgtcccgaatccctgcagggttcagaatctcccatgatgattggtgagttgagaagt

SEQ ID NO: 882295 - DNA, 98 bp, Homo sapiens
tttgggctttcctgtaccgaacagatttgcttgttgggtcgaacttgtggctattcatttattctcaccagggtttccaatacttatctacaggaatc

SEQ ID NO: 882296 - DNA, 99 bp, Homo sapiens
caaaagccaagaggaggacagttcgctacacagcaatgcatcgaggtaggagcaacggtgggaatgccctctgaggaatgcagtgatgtccatcagtca

SEQ ID NO: 882297 - DNA, 99 bp, Homo sapiens
aaaatatggaaattgaggaaagagagagagcagaaaagaagaaacgggcaactaaaactccaatggtgccgctacctggctgttcagctgtctcctgcc

SEQ ID NO: 882298 - DNA, 99 bp, Homo sapiens
agggctgcctgacccaggagctgcaaaccacccaagtctgcaatcttaccagggaggccaagcgaccacccaaagaagatattgcggtggtggagatga

SEQ ID NO: 882299 - DNA, 99 bp, Homo sapiens
ccttgcttcacagtccaaaattttgctcaaaacctgtggaggccgaggcttatagggggagctgcactcaaggtcagccaagatgctggtcaaggagtc

SEQ ID NO: 882300 - DNA, 98 bp, Homo sapiens
acagaggcagacgacgacagaaccctgtacaatttgatagtcattcgtaatcagcaggccaaagactcagaggttatcaatactctggctgaccatca

SEQ ID NO: 882301 - DNA, 99 bp, Homo sapiens
cgcttcctggatgagaagagcggcagtttcgtgagcgacctcagcagagagcgaaatgtcatcagtgcagtcacaacaggagcagttgtcccagtcaga

SEQ ID NO: 882302 - DNA, 99 bp, Homo sapiens
ggacagagtcttacgtggtgtccctgacaacaaattaagtgggcagaccaacatccacctcagcaaaaacttcttcctgacgaatcgcgccagggagcg

SEQ ID NO: 882303 - DNA, 99 bp, Homo sapiens
gtgcccacatcaaggagtatttctacaccagtggcaagtgctccaacccagcagtcgtaaatcgagctatagcagattatcttcgttcaaatggctatg

SEQ ID NO: 882304 - DNA, 99 bp, Homo sapiens
ccccaagccgccttccattatcctttttctgacccagcagtctcacagagtgacctgcactagtagatccaattcctgtggtcagcacagatcttggtg

SEQ ID NO: 882305 - DNA, 99 bp, Homo sapiens
aggaaataaaaacagaacaggaggtggtagagggcatggatatctctactcgctccaaaggactctagtatgggattcctttctacctacaatacctcg

SEQ ID NO: 882306 - DNA, 99 bp, Homo sapiens
ctcaatctccttttccttggctacccgaagcctgcctggaaagatgggtccactgccacgtgtgttctggctgtagacaacattctttatattgccaac

SEQ ID NO: 882307 - DNA, 99 bp, Homo sapiens
ggcctccgtgggacatggagtgttccttccgctagtgatcctttgcaccctgcttggagacggacttgcttccggggataaaaacattcagatggcaga

SEQ ID NO: 882308 - DNA, 99 bp, Homo sapiens
gattatggacccggccgaggcggtgctgcaagagaaggcactcaagtttatgagcctattgtgaagaatggcaggcctccaacgtctcacagtatgcat

SEQ ID NO: 882309 - DNA, 98 bp, Homo sapiens
cagaggatccagtgttcaccatcctggccccggaaggtcatcatcagatttgaaatatttaaagtggatacaaaactatttcagcaatgcagacaatt

SEQ ID NO: 882310 - DNA, 99 bp, Homo sapiens
gtggtcaacggggtcatctttaactgcttggccgtgcttgccctgtcatcccacctgagaaccatgctcaccgaccctcatggaggagcaggacttgga

SEQ ID NO: 882311 - DNA, 99 bp, Homo sapiens
taggaacagctccggtctacagctcccagcgtgagcgacgcagaagacgggtgatttctgcatttccatctgagtgtcttctcagaaacaaccagctga

SEQ ID NO: 882312 - DNA, 112 bp, Homo sapiens
tcatggcctatgacagaagagggagacctggagaccgttacgacggcatgctggatatgaacctgaatgaggagaaacagcaacctttgagggagaaggacatcatcatcaa

SEQ ID NO: 882313 - DNA, 99 bp, Homo sapiens
gttgcgccagtgccccctgcttctgccccagaaccggtcgaaaaccgtgtatgagggattcatctcggctcagtattggtaaaggttttcaaggtgtca

SEQ ID NO: 882314 - DNA, 98 bp, Homo sapiens
ctccaggatgtctacaaaattggtgcggcaacctttggcactgcatccatgagcatgcccacaggattcggcactcctgctccctacagtcttcccac

SEQ ID NO: 882315 - DNA, 99 bp, Homo sapiens
gatggctgcttacttcacagcagcacagctgatgaaagggaaacccagcgtttgctggcagaaccagttcctggcatcaaagccgaaccagatgagagc

SEQ ID NO: 882316 - DNA, 98 bp, Homo sapiens
tttcgatggcattaccagagtataggtgtaccgcaaaaccgtgattgcccagtggagggcgctggacctggatgtggtgctgacccccatgctggccc

SEQ ID NO: 882317 - DNA, 99 bp, Homo sapiens
ccgtggtcttccggaacttcacgttgtcggggaaggtccggttcaggtcttcactatcagaagtgtctgtggcctcgtcttccagcaccgacgctacgg

SEQ ID NO: 882318 - DNA, 99 bp, Homo sapiens
acgcagccgcggcttccggagccctcggggcggcggactggctcgcggtgcaggccccttcacagatgtagtcactacaaatcttaaattgcgaaatcc

SEQ ID NO: 882319 - DNA, 98 bp, Homo sapiens
agctgacggtggaggttcgcggctctaacggggctttctacaaggtggtaaagactatcggcctccgggaagtgtggtactttggcctccactatgtg

SEQ ID NO: 882320 - DNA, 99 bp, Homo sapiens
ggccgaggtgttgcggacgctggccgccgggaagatttccagaggattccagaacttgccatcaacccactgggggaccggatcatcaatgccttcttt

SEQ ID NO: 882321 - DNA, 99 bp, Homo sapiens
gggcgtggcagctgccttgcagcccttccctgcccttcagaatatttccctcaagcacctggggactgaaatacaatggagtctcactctgtcacccag

SEQ ID NO: 882322 - DNA, 99 bp, Homo sapiens
ttcgcgagcgcgttggagcggcactcggagcttctacagaaggtggagcccctacagaaggtggagcccgggcggagatggggttttgccatgttgccc

SEQ ID NO: 882323 - DNA, 98 bp, Homo sapiens
gaattcgtcctgcagaatcacgcggacatcgtctcctgtgtggcgatggtcttcctgctggggctcatgtttgagttggttcgactatgcaatgaggg

SEQ ID NO: 882324 - DNA, 98 bp, Homo sapiens
ccggcgaggggggcgccgcggcgggtggatgagagttggccccgatatccgctcagggaaactactttgcttcgcactttttcatgggaggagagaaa

SEQ ID NO: 882325 - DNA, 98 bp, Homo sapiens
tgatgtcttccagactcggtgctgtacccgccgagcttgaagaaatccgcaaatgtgggatgaaaaacttccgtaacatccaggttgatgaagctaat

SEQ ID NO: 882326 - DNA, 98 bp, Homo sapiens
gcctagcgtcctggaattacttcaatcaaatttcagagcaggacttcagaagctgccaaacttgaggctgaagtaagcaaggcacaagaaacaatcaa

SEQ ID NO: 882327 - DNA, 100 bp, Homo sapiens
gttagtattgacaactggtgccggagggacaaaaagcaatgcaagagtcgctttgtcttgcattgctttttgtccctccggcaccagttgtcaatactaa

SEQ ID NO: 882328 - DNA, 100 bp, Homo sapiens
tgggtattacagatgtagatgataaaatttcttggctgcatctccgagacgacgctcattggctcttttgatgattttatcatctacatctgtaataccc

SEQ ID NO: 882329 - DNA, 99 bp, Homo sapiens
ttgagtgtttgaatgccatccttatacatggagttgatattacaaccagtgacactgcaggctctttggtggacaagagggggaacatcctgatccccg

SEQ ID NO: 882330 - DNA, 99 bp, Homo sapiens
aggcagagtggaaaaaagagaggatttgcttttgtaacttttgatgatcatgatacagttgataaaattgttggtggcctgtggattaaaccacacttt

SEQ ID NO: 882331 - DNA, 98 bp, Homo sapiens
cgcaactagcggcgggtcgtgggcacctccagcttcttctcagcctgttgataaccatgttagcccatcttccttcttgggccagacaccagcatctc

SEQ ID NO: 882332 - DNA, 99 bp, Homo sapiens
gcccccaggaagcctttaccaacgccatcaccgacctcatcagtgagctgtccctgctggaggagcgcttccggctttgtcacccgaaagaaccgccaa

SEQ ID NO: 882333 - DNA, 99 bp, Homo sapiens
cttgaactggggagtcggagcctgcagtgagtcgagatctcgccactgcactccagccttacggatctgattggtggtcagcatgatgacgtcggtgcc

SEQ ID NO: 882334 - DNA, 98 bp, Homo sapiens
gagccttggcggcggacgtgcaggtgtcgtgaaaactacccctaaaagccaaaatgggaaaggaaaagactcatatcaacattgtcgtcattggacac

SEQ ID NO: 882335 - DNA, 99 bp, Homo sapiens
agaggccggcttggtcactatggaggagataggcatcttggtggagaaggctcaggcatgggttggaattggagcctatcccccaacccgaaggctaac

SEQ ID NO: 882336 - DNA, 99 bp, Homo sapiens
atcggcggagaccctcgaagtgcgcaaacttgacactcaccctgaccggtttttcgttggaatatacgttgcacatttatggcgattctgagtgtgagg

SEQ ID NO: 882337 - DNA, 99 bp, Homo sapiens
ttttattttgtctggaggtttaggtcatgggctgatcaccctccttggggtccccggcgtgaatcaccccgagtcgcgcacacccgccgctcgcctccg

SEQ ID NO: 882338 - DNA, 98 bp, Homo sapiens
gaagatttttgctgtctctggcctcatttctgatcgggaagcctcatctagcccagaggatcggaatgacagatgttggtccgcagtcattcacctgg

SEQ ID NO: 882339 - DNA, 99 bp, Homo sapiens
gtgtgctccttcctcaggcgcggtggctttgaagagccggtgctgctgaagaacatccgaggttcaagcactgtcttcctgttggccctgacaatcata

SEQ ID NO: 882340 - DNA, 99 bp, Homo sapiens
ggggcatattctctgcagaatttctgaaagttttccttccatctctgctgctctctcatttgctggccatcggattgggtttcagccgacttttcagct

SEQ ID NO: 882341 - DNA, 99 bp, Homo sapiens
gcggggtcacccctcagcacatggtgggggccacaccatttgccgtggccaggctagagttttcagataactattatcgtgcagaaatgattgatgccc

SEQ ID NO: 882342 - DNA, 99 bp, Homo sapiens
acagctaaagcaggaaaataaaactcttttgaaagttgtgggtcagctgaccagaggaattccagggaagaaatgtggtacaatcatacttacagcaga

SEQ ID NO: 882343 - DNA, 99 bp, Homo sapiens
ctgatctttgctggcaagcagctggaagatggacgtactttgtctgactacaatattcaaaaggggaagctggtggcagactccgccaagcacctgggt

SEQ ID NO: 882344 - DNA, 98 bp, Homo sapiens
tcagactgctgtgctagcaatcagcgagactccgtgggcgtaggaccctccgagccagtacttacaactacgattcaacaaaccagttcgctatgctg

SEQ ID NO: 882345 - DNA, 75 bp, Homo sapiens
aaatattatggatcctatctgaagggcgcaaaccagaagaagagggtgtggaagataacgggctggaggaaaact

SEQ ID NO: 882346 - DNA, 99 bp, Homo sapiens
ccagtgacaagcggacttccactcttctttgtcattactgtgacggctatcaaacagatcggtcgcttggttatcggacagaatggaatcctctccacc

SEQ ID NO: 882347 - DNA, 99 bp, Homo sapiens
cctgccattgtttatgccaaccaggaagtgccaccacctgtggagcagcagctggaaactgatgactatagatattttgatcccaaaatgctgcggggc

SEQ ID NO: 882348 - DNA, 99 bp, Homo sapiens
agggaccggctgctgcaggccatcgacccccagagcaacgtatgaaaatgaaagtcttcagaatggaaggaagtcaactgaatttccaagaaaaatacg

SEQ ID NO: 882349 - DNA, 98 bp, Homo sapiens
gagcagcgtatattaatgaagagtgtccggacccggctgaggacacccatgaaccttcccaaaatttttcggacgccgcccgatactacattccctga

SEQ ID NO: 882350 - DNA, 99 bp, Homo sapiens
acgccatcatgcatacctgaagccttttcgcgtcctcatcagtctgcttgacaagccagaaataggtgatgatccaatgccctttgacattaaagctga

SEQ ID NO: 882351 - DNA, 98 bp, Homo sapiens
tataatgactgtgcaaagaagattgttaaagaatatatacagccctgctctgggacacacctccattggatttaaaagacagtcctcgtcagcactga

SEQ ID NO: 882352 - DNA, 99 bp, Homo sapiens; identical to SEQ ID NO: 831550

SEQ ID NO: 882353 - DNA, 99 bp, Homo sapiens
cgaaccagtagaaaccgctgccaacactgtcgattacagaaatgccttgccgtagggatgtctcgagatgcattagtgaccagaaggatcccaaggatc

SEQ ID NO: 882354 - DNA, 99 bp, Homo sapiens
catgccttagaagaaacaattcttcgacatactctccagcttcaagtaacacaagtggcaagacagccgggaacccctaccccatccccttattcagca

SEQ ID NO: 882355 - DNA, 99 bp, Homo sapiens
agtggaacatggctagcaggaatgcttactgttgcgtggttcgttattaacaggatgaatgctatcaagtaagacaagtgtttgcccagaaacttcaca

SEQ ID NO: 882356 - DNA, 98 bp, Homo sapiens
tgggcttgcctgggctctccgggaatccaggacctccgggacgaaaggcaaatgtttgcagactacggctgaccgtacctcctgagagtccagttcct

SEQ ID NO: 882357 - DNA, 99 bp, Homo sapiens
ccagccgggaactccccatcgcgttttgccagcgataatacgcctcagacatatctgaagagatggattaagaatgctttggattaaggattgtggagc

SEQ ID NO: 882358 - DNA, 98 bp, Homo sapiens
catctccacatctagttgccccagttggttgaatctggcgatgtggaacccatggatatggagggctgactatatacaccatgttttttcctggcaca

SEQ ID NO: 882359 - DNA, 98 bp, Homo sapiens
tccctgagctgcctgtgtctctgcctccttccgcatgtggtcccaggtactccaaagattcaggtttactcacgtcatccagcagagaatggaaagtc

SEQ ID NO: 882360 - DNA, 98 bp, Homo sapiens
gtcttcccgcgtccgccgattcctcctccttggtcgccgcgtccttggctggcgtatcaacaggcggtccttcgggtcggagtggacatcggatggtg

SEQ ID NO: 882361 - DNA, 99 bp, Homo sapiens
cgaacaccatcgtttgctgaacacttgaaacatgatgaaagagccacagagttggcagaactgtttgaaaatgctaatgtgacagtgatgataacatgg

SEQ ID NO: 882362 - DNA, 99 bp, Homo sapiens
gtggaggatgtggtgctgcccgagaaggtggacgtgctggtgtctgagtggatggggacctgcctgctggttttcaccagccatatttttatatctgat

SEQ ID NO: 882363 - DNA, 99 bp, Homo sapiens
ggtttttcggatcatgtctggtggctccgcggattataacagtgaacagcagagaatttcaaaggaccttgctaatatctgtaagacggcagctacagc

SEQ ID NO: 882364 - DNA, 99 bp, Homo sapiens
tgtgaaccgaagtttagcaatggaaaagataaagtgttttggttttgatatggattatacccttgctggactattcttgataagaaagagctcttggag

SEQ ID NO: 882365 - DNA, 120 bp, Homo sapiens
caagatggaccctgtagcctatcgagtcaagtatacaccacaccaccgcacaggggacaaatggaaccctaaggactctgcaatatgaataattccctagagaacaccatctcctttgaa

SEQ ID NO: 882366 - DNA, 99 bp, Homo sapiens
atttgtgtggagcacacattgaatgggccaaggaaaaatcgagcagaaagaatgtctttcagggagcatgataaagatccagaaagcttttttaaggta

SEQ ID NO: 882367 - DNA, 98 bp, Homo sapiens
actttgtcacagcccaagatagttaagtgggggtacagccaaagaccggagctttggagagatgaagtttaaacagtgtcctacagagaacatggctc

SEQ ID NO: 882368 - DNA, 98 bp, Homo sapiens
gcttggatccacttccccatctgtaacgaggtgttgagacgaggtgctccatacttgcttgcagtgcctacgtggctctggctttgggtgataacctc

SEQ ID NO: 882369 - DNA, 99 bp, Homo sapiens
aactgttgggaaatacaatgaaaggggctatttttggagcattacaagatatacttgggagccgttctgtttcaaaggaatattataatcagacgggcc

SEQ ID NO: 882370 - DNA, 99 bp, Homo sapiens
cttattgttgtgtcagtgaattaggagaacttggaaaggttcagtttcgtgacgaaagattctgaagcttggcggagaggggtgtgtgagtggacacca

SEQ ID NO: 882371 - DNA, 99 bp, Homo sapiens
cggaggcagagcggctgccatgggaacccaccaagaccaacctggtcacattcttccataccgacctcagcggttacctcccacagaacgtggtggact

SEQ ID NO: 882372 - DNA, 99 bp, Homo sapiens
tccgaagcgatggagccccagctgaaggaaagcggaatcgatctgacaccgagcaggcaggaaactgcatatcttctggtttacatgaagatggagtgc

SEQ ID NO: 882373 - DNA, 99 bp, Homo sapiens
cctggtgatgcttctgaacaatgctatgctccttgggctgagaaagtagattatgatctgttggcttaagaatatcagattctggaaactcatcgaagt

SEQ ID NO: 882374 - DNA, 99 bp, Homo sapiens
gaagatactgggaaatccatagctaagatgccaggaccccctgaaagcctagacatgtgctgaagctgctgaaagatggcagaagaagtggtggtagta

SEQ ID NO: 882375 - DNA, 99 bp, Homo sapiens
agactctcttcgctctttgcatcttaactgcagagggagaaccgaagattacaggaggccagcatgaggttggaacaagagaatgatgaccttgcccat

SEQ ID NO: 882376 - DNA, 98 bp, Homo sapiens
cagtggccccactctgggctgccctgttcttcttcatgctgttgctgcttggtctcgacagccaggaaatagttcagcagttaattgaaaatagtaca

SEQ ID NO: 882377 - DNA, 98 bp, Homo sapiens
tcccagtggaggcggcaccgggggctggtgaaaaggaagccacaggcctggtgatagtcccactgcccacctggaatgctcggacccgggaacctgtc

SEQ ID NO: 882378 - DNA, 99 bp, Homo sapiens
gcactgatgtggacttgattgtggaagtgctaagatgtcagaatggcggcagtggagcatcgtcattcttcaggattgccctactggccctacctcaca

SEQ ID NO: 882379 - DNA, 98 bp, Homo sapiens
ccaggggctacgacccttgggatctgccctccgctcagctcgagcttccctcgtggccgacggaacaatgaaggagggtgcatctgcccggaagactc

SEQ ID NO: 882380 - DNA, 98 bp, Homo sapiens
ttccacaccgctcaaatgttatctgggaaattaaagttctacgtaaagagagtatggagctcgtaaaattaattgtagaaggcatgaaacaaaaaatg

SEQ ID NO: 882381 - DNA, 99 bp, Homo sapiens
gaaacaaggaaacccgtttgacaaagcatcacaggacatggccccctcagccacctagctggggcccatctaggagtggcatcttttttggtgccctga

SEQ ID NO: 882382 - DNA, 99 bp, Homo sapiens
gaactcccaagcgactgcaggcagaagctgagacggctaaggggtgagtcaggtgctgggaagacagaaaatacaaagaaagttattcagtaccttgcc

SEQ ID NO: 882383 - DNA, 99 bp, Homo sapiens
gtctcatgccacccgctgcccagacagctcgtgcaggtccgacgccctgtgcctcctaaccagctcgtactggaagcctgtggtcctccggccgatatc

SEQ ID NO: 882384 - DNA, 98 bp, Homo sapiens
ggcgttcctgcaatcttcacccttgcccggagaccaagcggaaagaccacagcaagattctttcattcgtctcctcctagcctgggggaccaggctcg

SEQ ID NO: 882385 - DNA, 98 bp, Homo sapiens
gtggcaatgcctgcactattgatgggctccctgtccggcagcctacccggctcactcagggatggtgccatgacaatggtgtgaactacaagattgga

SEQ ID NO: 882386 - DNA, 99 bp, Homo sapiens
gaaacacggaaactgagtatgggatctgatgatgctgcctacacacaaggtggctcaatcccttgtttaaaattggccataaacggagattagaggaag

SEQ ID NO: 882387 - DNA, 98 bp, Homo sapiens
aagattctgccgctgattgctatcacttctgcagaatccagtgggtttttcgttggaatatacgttgcacatttatggcgattctgagtgtgagggca

SEQ ID NO: 882388 - DNA, 99 bp, Homo sapiens
gagagcctgaagagttggaccagttgtacctggatgacgtgcggaaacatggctcgcgaaggactgcggaccctcgtggttgcaaagaaggcgttgaca

SEQ ID NO: 882389 - DNA, 99 bp, Homo sapiens
tacaatctggagaccacagtcccacaggttgacgagattagagagatggttgacaatgatttaggttttcaacaggctccactaatgtgctattccaga

SEQ ID NO: 882390 - DNA, 99 bp, Homo sapiens
cccttgggctgggacagtgaggaagtccggcagacttgtggctacacttctggccagtttgacctgggcctctgagcccaagtctgcacgtattcatcc

SEQ ID NO: 882391 - DNA, 98 bp, Homo sapiens
cagaacatgggtccgtggtcgtttgtttctccaaggtttgaaaagcagctggcctgcaagcttcataaacaagcagatatgcaagaagagaaaaaccg

SEQ ID NO: 882392 - DNA, 99 bp, Homo sapiens
ctgcaggtattgggagatccacagctaagacaccgggacctcctggaagccaaaaatggtgccttggtggatcaggcagtctttgaagaacttatcagg

SEQ ID NO: 882393 - DNA, 75 bp, Homo sapiens
ccaggtcgttggtggctccgaattttcagctgaactctcatctctcaacactggcaaatattcataagatctacc

SEQ ID NO: 882394 - DNA, 141 bp, Homo sapiens
caaattcgtgaagaatcagcatcatgtttggcagctgagtattggagccaggagcctgccatgaggaaatcaaagagcaggaggttgtggacaaagtcatggaaacactggacaatgatggagacggcgaatgtgacttcc

SEQ ID NO: 882395 - DNA, 99 bp, Homo sapiens
cggagtttgacgaagaggtggtttttgaggaagccttggaatcctgccagactcgcatttctaagctggagctccaccagcaagagcagcaagctctgc

SEQ ID NO: 882396 - DNA, 99 bp, Homo sapiens
ctcagttctgcgttaaatttgcaaatcttgccacttgcctagtgaggcttttccgaacctggaaggagacgtctagaaatcccaactttgctgtgtaag

SEQ ID NO: 882397 - DNA, 99 bp, Homo sapiens
agtgacagccagtgagaagaatgagtataaaggatgggttttaactacagacccagtctctgccaaggcttttttccagacttcaagctcccattccaa

SEQ ID NO: 882398 - DNA, 99 bp, Homo sapiens
accagctcgagtctcaagtggacaatgctctgtgcagtgtgcctagaagacttcaagcctcgagatgagttggggatttgcccatgtaagcacgccttc

SEQ ID NO: 882399 - DNA, 98 bp, Homo sapiens
agagtttcgttgtccttaagactgacctgggagacgtggctggaggccattgaggaaggagttcatgatcaagtgttgcccacaccaaatgcttcatc

SEQ ID NO: 882400 - DNA, 104 bp, Homo sapiens
ccgcctccaccaactcagatgacgtccgtgatgagaaggatctcaccatcccggagtctagtaccgtgaaggggatgatggccggaccgatggccgcgtttaaa

SEQ ID NO: 882401 - DNA, 99 bp, Homo sapiens
gttaactgggactttgtggaacaagtggagcaatttacagcaatgagggatttatacatgaaaaatggacaaggatttgcattagtttattccatcaca

SEQ ID NO: 882402 - DNA, 99 bp, Homo sapiens
tggaatttcaccataaccacatgtcaaaatgcagatcttcgtgaaaacccttaccggcaagaccatcacccttgaggtggagcccagtgacaccatcga

SEQ ID NO: 882403 - DNA, 99 bp, Homo sapiens
aaccagggaaccgagcgccacctcatgcacctggaattggacatctcggactccaaaatcaggagccgaggaggtgctgctgctggcccggcggacgga

SEQ ID NO: 882404 - DNA, 99 bp, Homo sapiens
ggccaagtaacatgttgtatcttcctttttgcttgtgggggcttcaggttatttgcttgtcatgtgacttggtgaggcatgctgtccattgggtgtgct

SEQ ID NO: 882405 - DNA, 99 bp, Homo sapiens
agcgccgacgtccgggtgcacgtgccacgcacgttcctgggcttcccgatggactcgagtttttactatgtgagcatcccggtgcctgcacagcaagga

SEQ ID NO: 882406 - DNA, 99 bp, Homo sapiens
cctcccaagtagctgggactacaggatgggaaatgcgacttgaaacccagtggtctatacttcagcaggactttttgaggggtcagacatccattggga

SEQ ID NO: 882407 - DNA, 99 bp, Homo sapiens
gaaaatcaacagtgaattgtagaaatcgagctatagcagattatcttcgttcaaatggctatgaagaggcatattcagtttttaaaaaggaagctgaat

SEQ ID NO: 882408 - DNA, 99 bp, Homo sapiens
cgcggatgtcggcgaagagttcaaccaggaattacatgaacgacagccttcgcaccgacgtcttcgtgcggttccagccagagagcatcgcctgtgcct

SEQ ID NO: 882409 - DNA, 98 bp, Homo sapiens
gaaaacacagtttctgcaggaaaagatctctctacttctcctaagatctaaagcgggaagccagtatctgtcatatgctgaaacatccacacattgta

SEQ ID NO: 882410 - DNA, 99 bp, Homo sapiens
ctttcattatctggagtttctggaacactagaatcttctgagatacctgttcctttgtccagatcaccttttgagatatcagtggaagaattaatactt

SEQ ID NO: 882411 - DNA, 98 bp, Homo sapiens
tttgtccctggatgccgtgttgggtttggttcggtgcttctccactctgcagtggctcttccgcttggacatcaggttgatggaaatcacaatcttct

SEQ ID NO: 882412 - DNA, 99 bp, Homo sapiens
tgtttcgggccagcgacccgctgctcagcgtcctcatgtggggggtaaaccactcgcattactctactgactggcagagacaggagaggtagatgtcca

SEQ ID NO: 882413 - DNA, 99 bp, Homo sapiens
caccaatcctaaatcactcctttatagttgtggtgaacatgaaccactagaaagacttcttcactcaacacacatcagatttagcatgtagactgctgg

SEQ ID NO: 882414 - DNA, 99 bp, Homo sapiens
tgccaagatgtatctactgtatccatgcactcagggtcggcactcttcaccctcccgagccctgcccgtctcggccccatgcccccaccagtcagcccc

SEQ ID NO: 882415 - DNA, 99 bp, Homo sapiens
ccaccggcaccacctgctccaaggccatcaagctcttcgtggagatccactctctgtgctacaacgattgcaccttctcacgcaacactccgaccagga

SEQ ID NO: 882416 - DNA, 99 bp, Homo sapiens
tgctcaaatctcctgctgtgaaccagcagaatttttgaacagggccagatattcgaagcttacaacatggcagctttgtggaaattaccttgtattttc

SEQ ID NO: 882417 - DNA, 99 bp, Homo sapiens
accttcattccagaagaaatccagtatctgagtaatttgcagtactttgctgtgaccaacaacaatggatccacatcttctggacccaactgtggaata

SEQ ID NO: 882418 - DNA, 98 bp, Homo sapiens
ggctcgccggtcagcggctcgtcgccgttcgccacccaaggtccctgcactcctagaaaatcaagtggaggaaaggacttgttctgattcagaagata

SEQ ID NO: 882419 - DNA, 99 bp, Homo sapiens
cggctcgggacggaggacgcgctagtgtggtgctgtgggtcggcctgggcgtcctggtggtgagcactgtcaccacactgtctgtgagcgaggaggtcc

SEQ ID NO: 882420 - DNA, 98 bp, Homo sapiens
caaattcgtgaagaatcagcatcatgtttggcagctgagtattggagccaggagcctgccatgagataacagctggttggccggtgtggccctgcaag

SEQ ID NO: 882421 - DNA, 99 bp, Homo sapiens
agtccttcagccactgtgggccctgcctctgcctgttcttctggaatgtcttgggggttttgatcctgtcactgtggttcaagcgattctcctgcctca

SEQ ID NO: 882422 - DNA, 98 bp, Homo sapiens
gtcaatgtgacatgcgtttcatacagaagtacctgcttcagagacatgagaagattcatactgacaccatggtatgcacaggctgctgctcctgcctg

SEQ ID NO: 882423 - DNA, 99 bp, Homo sapiens
gggattacaggcatgagccactgcacaatgacagcaacaccatagcaattaaagtccattccgcaggtttgtgtataatatttctatttgttaacctga

SEQ ID NO: 882424 - DNA, 98 bp, Homo sapiens
tggttgttccgttgcgagctgcagctgcgatctctgtggtaggcccaggtttcaggcacagaactgtatatccaataatagtgaaatggatcccacta

SEQ ID NO: 882425 - DNA, 99 bp, Homo sapiens
gtcggggacctcctagccagttacattccagaggatgaggcgctgatgcttcgggatggacggtgcgagaagccctacaacatatccctggcaagtatg

SEQ ID NO: 882426 - DNA, 136 bp, Homo sapiens
gcttactcatgctatttccatttttactgaaggcatcttaatgatgaaaacgactttggttggcatcatcaaggtgaaggatctaaaacctgaaaagaggccaaatgattcctcaaaaccacgcaagtacgaagta

SEQ ID NO: 882427 - DNA, 98 bp, Homo sapiens
ttcgtgacctgaagatactgggaaatccatagctaagatgccaggaccccctgaaagcctagacatggttcacctttccttgccagtgaagatggcgt

SEQ ID NO: 882428 - DNA, 98 bp, Homo sapiens
gagattccaaccttccagccccttttgaaagcaaagtgtgggatgctgtctcaggagatgaattgatgaccctggctcataaacacattgtcaagact

SEQ ID NO: 882429 - DNA, 99 bp, Homo sapiens
gggtgaagtgctccgccgcccttgcctccagctgagatctgtatctgtggacctgaatgttgatccctcgcttcagattgacatacctgatgcgctcag

SEQ ID NO: 882430 - DNA, 99 bp, Homo sapiens
aatgctcagaagactattcttctgcaggtggatcagaactgtgttcgcaattcttacgatgtcttctctttgctacggactgagcacggaaggcatcta

SEQ ID NO: 882431 - DNA, 99 bp, Homo sapiens
aggaatttcagaaaatcctaaaagcaaaatcaaaacacacaggcatcctgaaagaggttgctccttgagggcaggacagttcttatggctttatccgtt

SEQ ID NO: 882432 - DNA, 99 bp, Homo sapiens
ccaaaatggagagcgaatagaacgcttctctcgaaaagtttttgttggtggtcttcctccagatattgatgaaggctggagtgcagtggcgcaatctcg

SEQ ID NO: 882433 - DNA, 99 bp, Homo sapiens
aaacctggacattatattaagaattgcccaacaaatgggtttgtgatgtctggctggggtataggttattcatttcgatgtgacattgttgactattca

SEQ ID NO: 882434 - DNA, 99 bp, Homo sapiens
gacatgctcacctgaccagaccagcccagccgtcctgtcctgccagctctgctgccacctctgacagcttccacctaccgaaagagttttaggttggca

SEQ ID NO: 882435 - DNA, 99 bp, Homo sapiens
gtttgtgccagatgtaaaccttgtgatctttgcaataatgacttctttcttcagaatcttcatagcatagtattttccacttgccttctctcgaaccaa

SEQ ID NO: 882436 - DNA, 99 bp, Homo sapiens
ttcacatgctttacaagctgaggatgctcaccaagccctgttggagactatgcaaaacaagtttatcaaaatgcgatgatgttcaataatgatttgatg

SEQ ID NO: 882437 - DNA, 99 bp, Homo sapiens
atcctcttggcaggatcacagtcgcttcctgtctagtccaagattttcatacgtgaactgaactgtggctgcaccatctgtcttcatcttcccgccatc

SEQ ID NO: 882438 - DNA, 99 bp, Homo sapiens
ctggaaattaactgcctccattacactgctgagtcacacacaacgcttgttatgttttcatcacttctctccagaaggtcacgcaatatttaaactcac

SEQ ID NO: 882439 - DNA, 99 bp, Homo sapiens
gccaccgtccagctcatcaccaaccctttcataggactactgaccaacagtgattcgcctttgccagtctcatctcgtgtctgctttgttaagttccat

SEQ ID NO: 882440 - DNA, 99 bp, Homo sapiens
ctcgaagctccagctcgaaaccaccaaactcctccaggacagccttggtctcagaagacaagtggatcttcagggctgtaattccagctacttgggagg

SEQ ID NO: 882441 - DNA, 99 bp, Homo sapiens
tcgggaccatcgtcgtgaggatcgtgtgcattacaggagtcctccacttgccactggtttattggctcttctgaagccctgtaaagattttgaagtgga

SEQ ID NO: 882442 - DNA, 99 bp, Homo sapiens
accgaggaaagtgtgtgggaggcgttgacctgccccttgtcctggccccgagcttggggcttccttggtcgcacccaccacctgcctgcccactggtca

SEQ ID NO: 882443 - DNA, 98 bp, Homo sapiens
ccaggacagtagcacacagactgacacatctcacagtgggcactctcgagtggaccctgaggagctcttcaccaagctcgaccgcattggcaagggct

SEQ ID NO: 882444 - DNA, 99 bp, Homo sapiens
tcaagatctggactactgttgaaaaaatttccagtgagtgctcatctctcagagatctagaacttgcctaccaagtacatggccttttaaaaaccggag

SEQ ID NO: 882445 - DNA, 99 bp, Homo sapiens
tttgggggagcagacggttgacagtgttgagtttgattgaagattttcgacaatgaagccaaagacgtggagagagaagtttgctttattgatattgcc

SEQ ID NO: 882446 - DNA, 99 bp, Homo sapiens
ttggactatgactttcaacgggactattatgataggatttgtactgtgttcgcagtgacctggggaacctgctcaaagccctgggtcgcttggaagaag

SEQ ID NO: 882447 - DNA, 99 bp, Homo sapiens
attgggctcgccgctgctgctcgaggttgtattcccgcagctcggccagcagggtactggctgaaatggccataagtgcctgaatgggtcgccaggcca

SEQ ID NO: 882448 - DNA, 98 bp, Homo sapiens
caaccagtcccagcgctgtcgtgctcctctactcgctgcaagtgtccactgcttgggaaagtgtgggaagctgacttggaagcttgtcgattgcttat

SEQ ID NO: 882449 - DNA, 99 bp, Homo sapiens
gctcttccaaccaggggctgagcttctgcgctgtggagaagccaggtgccaggggagagcaagaaacagtggaaaccagccctggttgtgctgactgag

SEQ ID NO: 882450 - DNA, 99 bp, Homo sapiens
gcttgtcttctcgggcttctcgccccggccgcggccgggtcctcagatgagcagcaccagcagtaagagggctccgaccacggcaacccagaggctgaa

SEQ ID NO: 882451 - DNA, 99 bp, Homo sapiens
ttaccatcaatactatggaatgcattttgaaacttaaggatgggatacagatgcccagcctacagagtctgagaaggaaatttataatcaggtgaatgt

SEQ ID NO: 882452 - DNA, 147 bp, Homo sapiens
gctgctgtaaaatattacaggcatactttggagatgttacgggtttggcaatctctatccttggtctcaaatgtgcaggcagtggtggaaagacatggcagagtggagtaactaaatccacagtttttttattgcagtgatgtggaa

SEQ ID NO: 882453 - DNA, 99 bp, Homo sapiens
tccacacggtgctggtggagcgctccacgctcaaagagctaatgtcaaaccccgaaattccacaccacctagtttggcaagaaatcctgccccaggtgt

SEQ ID NO: 882454 - DNA, 99 bp, Homo sapiens
acgccattatgggcagtgggattttgggactcgcctttgccctggcaaacactggaatcctactttttctgtttaccgacaagactgtgaaactttcgg

SEQ ID NO: 882455 - DNA, 99 bp, Homo sapiens
aagattcagaagaactgttgaaactagcaacatctataagtgaaaccttggaagagaaggcatttgcaagtaaaatcactggcatgttgttggaattat

SEQ ID NO: 882456 - DNA, 99 bp, Homo sapiens
ctggagaggaggacccagcccagagccgggccttggagagctccctgtgggagcttcagagcactgcagtttcctcctgaaggctggctccggctctcc

SEQ ID NO: 882457 - DNA, 99 bp, Homo sapiens
tctcagaagacagagggttttcttttgagatactaaaatgtctgatgatgctggtgacaccttagccactggagacaaagcagaagttactgagatgcc

SEQ ID NO: 882458 - DNA, 99 bp, Homo sapiens
cgatggcattttgaaaacagcaaagcttcttggacacttaatgattgttggcaagaaatgtgctgctgatctgggcctgaataagggttatcgaatggt

SEQ ID NO: 882459 - DNA, 99 bp, Homo sapiens
ttccctgtgttctgcttttttcattgttccactggacgctcatcagagggaagatctttttcctcaattggttaatgttgaagaaggaaaatgcggaag

SEQ ID NO: 882460 - DNA, 98 bp, Homo sapiens
catggcggaagcagaggagcagagctaaagttgcagacaagatccagctcatcaataatatgctggacaaagtcaatgagatgattattggtggtgga

SEQ ID NO: 882461 - DNA, 99 bp, Homo sapiens
aattgcagtggaaaatattgttttgaagcacctacactggcaacattagatccacctcatacagagttctccggggtgctgcaccagtgtcacattttg

SEQ ID NO: 882462 - DNA, 98 bp, Homo sapiens
gtggactggagcagtgagaaagcaaaggctgctctgaagcgcacgacctccgactactttctccttcaaggcacgtgtggttctcaaatataggcatt

SEQ ID NO: 882463 - DNA, 99 bp, Homo sapiens
accctggtatatgcacttttcagttagagatgtttatgattacttccgagctgtcctgcagcgtgatgaaagaagtgaacgagcttttaagctaacccg

SEQ ID NO: 882464 - DNA, 99 bp, Homo sapiens
gaacttaccacaggcaactttctcttccgaaagttttcatccctcagtcctgggtccaggtagagccgtgtgtagaacagctggtcgtcgtcatcatcc

SEQ ID NO: 882465 - DNA, 99 bp, Homo sapiens
taatataccatcttctgtggagtcctcaggtgagtgaaaggtggtcctttcctgctctcctcaagctctcctcaagctctgtctcttctggcaggcaca

SEQ ID NO: 882466 - DNA, 99 bp, Homo sapiens
ttaattaaagaaattgcagttaccagtgtctcaatagcactcccataatcaccctctgagcttttgcgagttcttcttttaatcgttcatagccctttt

SEQ ID NO: 882467 - DNA, 100 bp, Homo sapiens
taatatgggagaaggactgttgggagaatttaggattgaaggcttgctggactggattcaacaagatcctaaattctcccaacagtccttctcccatatt

SEQ ID NO: 882468 - DNA, 99 bp, Homo sapiens
gtacgtcttcgggtctacccctaatcacgttcacctttccttgccagtgaagatggcgtgcttggcggagtgattgtcctccgttcatgcagatgttct

SEQ ID NO: 882469 - DNA, 99 bp, Homo sapiens
agcacaccctgggcacggtccacacccacagcgcccacttcaaggtggatctggatgtagcagtgcccagtgggattgcagccgagtccctgaccttca

SEQ ID NO: 882470 - DNA, 99 bp, Homo sapiens
tcttagtaagatgaaatacgatgaaatcacagctacatatttgttattggggagaaaatcttcagagaattcaaggaagccttctccctatttgataaa

SEQ ID NO: 882471 - DNA, 99 bp, Homo sapiens
attccagcactggactcatggaggctgagcatttattcagaatcctaatgtacctggctagctggtggtgagtaggggctttggggccaacttggtggg

SEQ ID NO: 882472 - DNA, 98 bp, Homo sapiens
tccggtccggcccgccgccgcacccaggacggaggctgcatgcccgaggaccaggccggcgcagccatgatcgtcagtatttaaacagatcacatcat

SEQ ID NO: 882473 - DNA, 99 bp, Homo sapiens
ttcaaggacaaaggtggcccagaattttccagtgccctgaaaaatagtaaccatggagaaagagctgcggagcaccattcttttcaatgcctacaaaaa

SEQ ID NO: 882474 - DNA, 104 bp, Homo sapiens
agaaactcatagctgaattcaatgtttattcttatggactacttagcatttgactagacggtatgaatttctaagtaagctactcaggaggctgaggcaggaga

SEQ ID NO: 882475 - DNA, 99 bp, Homo sapiens
actttacatccgagtccaaagttgtgtttactgagaagaccacagaatcctggccctcttatacctcagccttcgagtcaacagactcctgagaggaaa

SEQ ID NO: 882476 - DNA, 99 bp, Homo sapiens
gcctcccaagtagctgagattacagaaagaatcttcaagagggagacatagggaaaaggaagacataaaaatcactaaggaaagaactccagaaagtga

SEQ ID NO: 882477 - DNA, 99 bp, Homo sapiens
gttggagaatctggtccttaaggatatgtcagatgttctttatagctccaagctctacagattcttcaaatatattgagaatagggatgttgcaaaaac

SEQ ID NO: 882478 - DNA, 100 bp, Homo sapiens
ctttacttttaccgtaacagacagcaattactctgctaatggcttccacattcatacaggatttccatcttctggggccgccaacgtaggtaaaagtaaa

SEQ ID NO: 882479 - DNA, 99 bp, Homo sapiens
aaaaccttcatggtgatccatggctggacgatttcagaggctttgaaaaaatttggtatctcagcaaatgacacttcaattctaattgtttacattgaa

SEQ ID NO: 882480 - DNA, 101 bp, Homo sapiens
tgggcaacaagagtgaaactctctttatcttcaaatgccattgatgcagcacagttgtctggcatttgaagataaagagagtttcactcttgttgcccagg

SEQ ID NO: 882481 - DNA, 99 bp, Homo sapiens
gaaaggacagcagcattgatcaatcttacagctaacatgttgtacctggaaaacaatgcccagactcaatttagtgagtatggactccaattgccttga

SEQ ID NO: 882482 - DNA, 99 bp, Homo sapiens
gcggcaggagccgccgccgacacctgaagatgagctgcttcagaaagagcaaaactattcagatgacgtcttggccaacatgattagtgaaccaaggat

SEQ ID NO: 882483 - DNA, 99 bp, Homo sapiens
ggtttcgtgtgtttgacaaggaggggaacggcaaagtcatgggagcagagctcagacatgttctcaccacccttggccctggccaacgtcaacattggg

SEQ ID NO: 882484 - DNA, 99 bp, Homo sapiens
ctaccatgacgaaaacatgtactacagccagtcttctatgtttccacatcggtcagaaaaagatgtcacaccgacaaatctgaagcgggtttgccaggg

SEQ ID NO: 882485 - DNA, 148 bp, Homo sapiens
gctgacttacactgaactggtactggatgatcaaggtcagctggtccacatgaacaggcttccaggaggaaatgagtgtggtggaaaaggaagagagagctgaggcagacgatgtaagatctgctgttacttcttgctgtgtgacctt

SEQ ID NO: 882486 - DNA, 99 bp, Homo sapiens
tggatgtttgtcaaaaagtggatcttcttggagcgagcagatgcaatctcttgtctcacatgctagcaacataccagatctgctttgacagtaaacccc

SEQ ID NO: 882487 - DNA, 98 bp, Homo sapiens
gcgcttcgaaatcgcctgctacaaaaacaaggtcgtcggctggcggagcggcgttatcgtgaagagcgcttccgactgacgagcgagagcaccaacca

SEQ ID NO: 882488 - DNA, 99 bp, Homo sapiens
ctgcgggcggcgctgtgtccgtcgccatgacaggtgaatggctatgtggtgaaccttttctgggcatttgacacccacaagcaagagaggagaactttg

SEQ ID NO: 882489 - DNA, 99 bp, Homo sapiens
cacggtgaaaccccgtctctacccttcacgccagcatctcttctcctctcccactgcagttcagcccaacctccccagcgttctgaagggcttgcacat

SEQ ID NO: 882490 - DNA, 99 bp, Homo sapiens
tctgtttctctgctgcaccgacctcgacgtcttgcctgtgtcccacttgttcgcggcctataggacattgccgagaatggctgcgcccccaccccagaa

SEQ ID NO: 882491 - DNA, 99 bp, Homo sapiens
agcagagtgctgaaggtgctatctgtctgctctagtaataagccggctattgtagaagctggacctcagcagccatgtcgaagccccatagtgaagccg

SEQ ID NO: 882492 - DNA, 98 bp, Homo sapiens
tgctccagatcctgaaaataaaggcacagtggaacatgatctggatcagattgactacatagacagctgcaccgcagaggaagaggaggccgaggtga

SEQ ID NO: 882493 - DNA, 98 bp, Homo sapiens
gaaaacacatctttacacactaacaatggctgccatccggaagaaactggtgattgttggtgatggagcctgtggaaagacatgcttgctcatagtct

SEQ ID NO: 882494 - DNA, 99 bp, Homo sapiens
gtggatttgatccctgtgaatgtgtttgctctcatgaacatgcaatgagaagactgatcaatctgattattcagagctgggagagcttcccccacgatc

SEQ ID NO: 882495 - DNA, 99 bp, Homo sapiens
attaccttcagctgtatcacgagacaaggagctggcgttacagcccaaagatgatattgtagaccgagcaaaaatggaagataccctgaagaggaggtt

SEQ ID NO: 882496 - DNA, 99 bp, Homo sapiens
agggcgacctggaagtccaactacttccttaagatcatcatggtgactcgaacgaagaagatctttgtgggggggctgtcggtgaacaccacggtggag

SEQ ID NO: 882497 - DNA, 99 bp, Homo sapiens
aacgtgaaaaaaaagacctgctttgccctgggaaatagtaaccctgccaaatacatcagcttgtaggagacagagactcagattgatggacaacttttc

SEQ ID NO: 882498 - DNA, 98 bp, Homo sapiens
cttaatacagcaagaaagaccatcaagtttaccagacagaatgacttggaagataacggagcttcgaagcttctagcagaatatgaagtctttcgtct

SEQ ID NO: 882499 - DNA, 101 bp, Homo sapiens
ctctccagagtagctgggattacagggagacacatcgcctctgcctcccactgtcccagactgtctgcgggctgatgtcagggttcctccttctgagagcc

SEQ ID NO: 882500 - DNA, 98 bp, Homo sapiens
gacgatctgcacttcgcattttggcattgacatttaattttagggtcctttatatagaagggagaggctctcacctttgtgtatccttttggtgccac

SEQ ID NO: 882501 - DNA, 99 bp, Homo sapiens
ctgcatcttccaccgtaatacaggctgttggaatcttgggcacgccatcctggtattcctgaatacctgtgtgaggatctccatccacttctggtcttc

SEQ ID NO: 882502 - DNA, 99 bp, Homo sapiens
gagatttccagccttccaagctctactgtgacttcagagacactgccaagcagccttagccctagtgtagagactatctgtcaaaaaacacctaaggac

SEQ ID NO: 882503 - DNA, 99 bp, Homo sapiens
cctgcttctgacccatgtggctgacgcctggggcgtggagctgcccaagcgtggctatccccctgaccaatgatgcgagctcagagtcaatagcatcct

SEQ ID NO: 882504 - DNA, 99 bp, Homo sapiens
atcttcttgccatccgcctggccttcgtcattgtgtttgagccattgagacccagagcagcagttctgaagagatagtgcccagccctccctcgccacc

SEQ ID NO: 882505 - DNA, 98 bp, Homo sapiens
tggaataggtgtatcaagtaatggtgcaaagcctgaattcttttagatcagcctgagatatggggttcaggccaaccaattaatccaagcatggagtc

SEQ ID NO: 882506 - DNA, 99 bp, Homo sapiens
gaggagtctcagagctgtcagaaagattgatagtggtgctgtatggaagcaaatttatatggaccttggcattcctattttgaattcagctgcttccta

SEQ ID NO: 882507 - DNA, 99 bp, Homo sapiens
ttccacggtcctgcgcctcttgcaactgggggagtattcgtcggtgatagtgttcagggcggtgtctgccccgatgctgaaatcggaacccggcacatt

SEQ ID NO: 882508 - DNA, 99 bp, Homo sapiens
ttacacttgaaatacagactgttggggaacaagagaacaaaatccagtctcatagcagaggagaatataatgtttacagcaccttccagagccatgaac

SEQ ID NO: 882509 - DNA, 98 bp, Homo sapiens
gtttaccttggaagaactccgtgcccagatgctcataaggattgtcctctttctacaaaaggatgataatgaagataattcaaatgatgggacccagc

SEQ ID NO: 882510 - DNA, 99 bp, Homo sapiens
tgaagaactgctttcaattctaagtgtgtactagccctctcttggtacccacctgatgtaaatgatgaaaatggagaacctactgataacttggtaccc

SEQ ID NO: 882511 - DNA, 99 bp, Homo sapiens
ccgtgcgcctccaccaagtcctcctgttccagcccggctattcgctccagggtatctatgttctggccacatccaggcgcagtacatagaaagggtttg

SEQ ID NO: 882512 - DNA, 98 bp, Homo sapiens
agtgtcccaccatcaaagagatcagagaccagggctcctgtggctcctgctgggcaaagtgtttcatggatttcaaagctggaggcgccttatgtcac

SEQ ID NO: 882513 - DNA, 99 bp, Homo sapiens
gcagtggcagcatggagaaacgcaagtccatgtacacgcgagattataagaagcttgggttcattttactccacaggatccgctgaacataggatgttg

SEQ ID NO: 882514 - DNA, 98 bp, Homo sapiens
gctcaccgcaacctccgcctcccaggcctgttcctgaacttcctgggaagtcaaccttcttcggcacctcagatgagttcattgagaagcgacgacaa

SEQ ID NO: 882515 - DNA, 99 bp, Homo sapiens
aatccatctggtcctggactctttttgtggttggatttcatcccttactggtctcaaccaaaatattcctgttggaatcatgatgataatcatagcagc

SEQ ID NO: 882516 - DNA, 98 bp, Homo sapiens
aaggattcagtaaaaatgatggactgaagatgcacattcgtactcacaccagggattgaatatgatgcatatcgcactgatttggaagaactgaatct

SEQ ID NO: 882517 - DNA, 98 bp, Homo sapiens
ttttctacagcttctgataatcaaccaactgttacaatcaaggtctatgaaggtactccaaagattcaggtttactcacgtcatccagcagagaatgg

SEQ ID NO: 882518 - DNA, 99 bp, Homo sapiens
aagagggcagccgcctgaaggaacgcgacggcggcgcccgcagctggccaaatttcgcagtctcctgtgcacagcggagggtgaagcagcagcttttct

SEQ ID NO: 882519 - DNA, 99 bp, Homo sapiens
gcagcttagatgccatttctcctgttcagattgtcactgctgttccaagggcacacgcagagggatttggaattcctggagagttgcctttgtgagaag

SEQ ID NO: 882520 - DNA, 99 bp, Homo sapiens
tacacccccaaagagcaactgaagattcatacgcagctggcagatattatcatagttgctgcaggagtgtgtgctctgaatggaaagttatacatcgtt

SEQ ID NO: 882521 - DNA, 98 bp, Homo sapiens
aaaataacatccgatcagttattcatgatgttgctatcaaaagttgagaaattgtcagaagaaatcatggagataatgcaaaatttaagtagtataca

SEQ ID NO: 882522 - DNA, 99 bp, Homo sapiens
cccaaagtgctggaattacaggtcatgcaaggatcagatgtgagaggaatggagaacctcaggatcaactcaagtaattggaaaaagtatttgaaaaat

SEQ ID NO: 882523 - DNA, 99 bp, Homo sapiens
ggggggcctggccgcgcagccgtgggaccctgaagatgtgaacctcgaaggcagcaaagaaaatgtggagctactgggatcccaggtgcaccaggactc

SEQ ID NO: 882524 - DNA, 99 bp, Homo sapiens
caggaataggatttgcagggagagcagggatatcagaaaggtctgtactggatgttttctggatgactttatagaagtaggcgtactgtcgagctgtgt

SEQ ID NO: 882525 - DNA, 99 bp, Homo sapiens
catccccaccccacaggatctgccccagagaaagtcctcgctcgtcaccagcaagcttgcggggaaatttggtgagcggcctccacctaaacgacttac

SEQ ID NO: 882526 - DNA, 99 bp, Homo sapiens
agacccagtttgatgaaggacgggttgatggtcgaatgctacattacatgactgttacaaccagatgttccaatattttattacagttgtgccaacaaa

SEQ ID NO: 882527 - DNA, 98 bp, Homo sapiens
acaaagctctgctgctgggggccctcgctctgaccaccgtgatgagcccctgtggaggtgaagacattgtgggttctgatctacaatggccaactgga

SEQ ID NO: 882528 - DNA, 99 bp, Homo sapiens
ctttgggatccttgttcccctcctgcctcaccactgggtgcccgctggctacgctatatatcagctacttcagtgggctgctatctggctccatcagaa

SEQ ID NO: 882529 - DNA, 98 bp, Homo sapiens
gtcatcattaagttggagcagggagaggagctgtggataacgggaggtgaatttccatgtcaacatagtcctgactgtcagcatcaataaggccatta

SEQ ID NO: 882530 - DNA, 99 bp, Homo sapiens
ctgaatatgtcatctacagaggagaacagagaggtgagagacttcagaggctgccctttcttttcatctgctgcttgtgaaaggaaaacatcttgggcc

SEQ ID NO: 882531 - DNA, 99 bp, Homo sapiens
gacgaccacctgcgcctagtccggcctcgtcacgtgttcaatatgctaaagaagtatgtccgcgcagaacagaaggacagacagcacaccctaaagcat

SEQ ID NO: 882532 - DNA, 98 bp, Homo sapiens
caatctcctcctccactgccactacagggaagtgcatcacatgtcaggaggaaatcagtggtgcttcaggatattgtgaatttggtcttctgaaagca

SEQ ID NO: 882533 - DNA, 99 bp, Homo sapiens
cagcaatcagctggcctggtttgatactgacctgtaaatcatcctttagatcttagacgaattttacaatgtgaagttctgcatagatgccagtcaacc

SEQ ID NO: 882534 - DNA, 98 bp, Homo sapiens
acgtattcagtgaatgggaacaacgaggtcatggttcatgttgtggagaatccagtttccgctttgtggccacatggtgtcagatgaatatgagcagc

SEQ ID NO: 882535 - DNA, 98 bp, Homo sapiens
tctgttccgcacaggcctgctgaactgggtgctttatataggctctttccttcggggaacaagccgggcccttgctggccgggccccagctcacatgc

SEQ ID NO: 882536 - DNA, 99 bp, Homo sapiens
gagaaaatgaccgcaatctctgccagcaccttgggaagagaaagaaaatgccgaaggcactcagacaggtgaccattgtgaggtagatattttgttcta

SEQ ID NO: 882537 - DNA, 98 bp, Homo sapiens
gctttcctaccagaccctgaaattcacgcatcaggcgcgggaagcggactgggtgaaagctttttctgcagcagtcatgttgaaaaccttgtgttgac

SEQ ID NO: 882538 - DNA, 98 bp, Homo sapiens
tacttcaagctttggccatcaatagctctgagcattatgccagtacatacaggcttctaaagccagggatggtgccagccctttcatttcaagtacga

SEQ ID NO: 882539 - DNA, 98 bp, Homo sapiens
gagctggaaaaacctgtgctcatatcactgggaaaaggatcttgtagaaaatttcagctgtagcccttggactagaagctgaaataacagaagctgtg

SEQ ID NO: 882540 - DNA, 98 bp, Homo sapiens
gtactggcacgctctatagccaaggaaggcttcgagaagattagcaaaggtgctaatccagtggaaatcaggagagatgcagtctcactctgtcggtc

SEQ ID NO: 882541 - DNA, 99 bp, Homo sapiens
ctcctccaccttctccttcttctccttcaggtccctgctcgcccgccggctggagtctcccggcggcgttcgcccctgtcactactggcgctggggtcc

SEQ ID NO: 882542 - DNA, 99 bp, Homo sapiens
tgttagtaatgatgaaacatttttcaatgaatcaaagcaggcgattactcgtccattttcaacttggcagcttttcgaaggatgtgcaaatttacattc

SEQ ID NO: 882543 - DNA, 99 bp, Homo sapiens
aacgatgtgcgagaactgcgcagacctggtggaggtgttaaatgaaagtgtctgctttttcaacgtgggagaaggagttgcacaagatagtttttgatc

SEQ ID NO: 882544 - DNA, 99 bp, Homo sapiens
cttgatttgtttttggcatactacgtgcaggagcaagggtatgcagaagttggctagtcaatacctgaagagagattggcctggagtaaaagctgatga

SEQ ID NO: 882545 - DNA, 99 bp, Homo sapiens
ttcaaagatcagcattttgatcaaaatctcaacttcatgtacatagaagttgataaagtaacagagaggatgagctttgatccaaaccttctccacaac

SEQ ID NO: 882546 - DNA, 99 bp, Homo sapiens
tccagacttcactgtgaatgatgtcaaaatgtgtgtgggcaagataacccctgtgacagaaggctactgttgctgtaacaaagggcatacatacatttt

SEQ ID NO: 882547 - DNA, 99 bp, Homo sapiens
ctcctattgaagtatttttggcacccatgttatcatcactgtcacatttttcaggttgaacatctggttgctgttcattagtattttgttctgaccaag

SEQ ID NO: 882548 - DNA, 99 bp, Homo sapiens
gtgaaggaggccctcctggagttgcaggaccccctggaggttctggacctgctgtcctgagggagtctaacaagttagcagaaatggaagaaccaccct

SEQ ID NO: 882549 - DNA, 135 bp, Homo sapiens
gtccctgcatctctgaagagccaaaggtgacccgagcttcaatgtacttagagtacattgaagctcgggtcacctttggctcttcagagatgcagggacacacgatgggcttctggttaaccaaactgaattatt

SEQ ID NO: 882550 - DNA, 99 bp, Homo sapiens
acagaaactgaacaagggtggctgggaccatggagacacccagagtatccagtactatgacgacacctaccccagtgtcaaggagcaaaaggcctttga

SEQ ID NO: 882551 - DNA, 99 bp, Homo sapiens
gctgttatctagccttatctatgacagctgtgggccacaggagtcagtggatcggtggggaaaatgctgcttaccctgggccctgggctgtagaaagaa

SEQ ID NO: 882552 - DNA, 99 bp, Homo sapiens
ccacatacaggagacaccaaagaagagaaagacaaggatgaccaggaatgggaaagccccaggatcaacggccaccccgggaagtccacgcgcctggcg

SEQ ID NO: 882553 - DNA, 99 bp, Homo sapiens
aaaccatgagtgtaaggttaccccagagtatagacaggtctgccatcatggatgttctcgcagaagcaaatggcacctttgccttaaaccttttgaaaa

SEQ ID NO: 882554 - DNA, 99 bp, Homo sapiens
ctgggcaacagagcaagactcttgtttggtgatctgaaaagtcttcttactgcaaagtacaactgcctgaagcatctcatggggagacacatgtgcctt

SEQ ID NO: 882555 - DNA, 109 bp, Homo sapiens
cagctggaggagctgatagacatggctgtgctggaggaaattcaacaggagctgatcaaccaagagataattgacgaccttgccaacctagtggagaacacagatgaaa

SEQ ID NO: 882556 - DNA, 98 bp, Homo sapiens
aatgtaactccgttgaagcaggtaagaagtaccaatgggatgcagaaactcaaggatggattctcggttcctttttttatggctacatcatcacacag

SEQ ID NO: 882557 - DNA, 98 bp, Homo sapiens
cgcgtgcgcaagtcctacagtcgtcggaccactgaagctacctagatatgcagcccctactcagtgccctgccaaatgtgggcatgtttgaccccagc

SEQ ID NO: 882558 - DNA, 98 bp, Homo sapiens
gaagacgtccaatctgagcgtgctgcggacggcgctgcggtacatccagggggggccctcagcctcttggccttgaacgggctgttcatcttgattca

SEQ ID NO: 882559 - DNA, 99 bp, Homo sapiens
cttccccagctctgcagccacatactatccgtttgttcaggaaccaccagtgacagacaattcacagaagctgtgagtccttcagtgctacccccttca

SEQ ID NO: 882560 - DNA, 98 bp, Homo sapiens
ttcttaaagagctggtggagcctgtgtcccgtttcttcgaggaatggttttagggaagactgttgccggatgacaaggctgtcactattgttctgtac

SEQ ID NO: 882561 - DNA, 99 bp, Homo sapiens
gtttctttcttgctttcaaaaccaggaagggagtcaaatcacatttccttggctttttagcatccatttgagtcctggtgggacccatttaggtttctt

SEQ ID NO: 882562 - DNA, 98 bp, Homo sapiens
ggaactgctggggaaggcgattggcatcgatctctccatcccttccgaggcccgacttcgtttggaaattttagcattcaggtgccaggaatgcagat

SEQ ID NO: 882563 - DNA, 99 bp, Homo sapiens
cggcggcggcggcagcgacagcagcagcagcagccagtattcgggaaaggcagacagggccggtgcataaacttctcccgagttccatctcagtaaaag

SEQ ID NO: 882564 - DNA, 99 bp, Homo sapiens
gtaaggagaagcccacaaccgccctcctggacaaggtggccgacaacctggccatccagcttgctgtatgtgaaagcaagaacagagctaacatgggat

SEQ ID NO: 882565 - DNA, 99 bp, Homo sapiens
ttcactcgagagatgaggacactgaaattcagagaggggaagtgatttgcctcagcttgtactgctggttggaaggaaaatcatgcaacattcatgagc

SEQ ID NO: 882566 - DNA, 99 bp, Homo sapiens
gaagaagctgtgtctccgagaagctataagctgtcattggaaggaatagtggtacaaagagctgaatgccgaccagctgccagtgaaaactacatgcga

SEQ ID NO: 882567 - DNA, 98 bp, Homo sapiens
gaagatgggaagaaagaagcagctgccagagagaagaagaaggaggttcctgctgtgccagaaacccttaagaaaaagcgaaggaatttcgcagagct

SEQ ID NO: 882568 - DNA, 98 bp, Homo sapiens
ggattctggaggcatcattgtggccattgagcacagcagccgtcctatcaatgtgattaaggcgtatcctggatctaaagactggaacagtgaaaaag

SEQ ID NO: 882569 - DNA, 98 bp, Homo sapiens
cgcgaagagccgttagtcatgccggtgtggtggcggcggcggagactgcgggcccgtagctgggctctgcgaggtgctgctacccccgtatgatgatg

SEQ ID NO: 882570 - DNA, 99 bp, Homo sapiens
ggcacgggagcatggcagccaacgtctcgggtactccaaagattcaggtttactcacgtcatccagcagagaatggaaagtcaaatttcctgaattgct

SEQ ID NO: 882571 - DNA, 98 bp, Homo sapiens
gaatgagaatgagttggataactctctaaactctcagtctaacacgaatacagacagatgcctttggtgcttcatgaagaatatttccagatatctca

SEQ ID NO: 882572 - DNA, 99 bp, Homo sapiens
tgcagcgatacagctcagaccccacaggcgccttgactgaggacagcatagacgacaccttcctcccagtgcctggacagagcgggatgccaccagctt

SEQ ID NO: 882573 - DNA, 99 bp, Homo sapiens
ggcgtctctggccggccttggtgcggcgagccgagcgaggcagctctgagccgcgcggtgcatggtactcagtaggtgccctgatgatttcagtgcccg

SEQ ID NO: 882574 - DNA, 98 bp, Homo sapiens
acaggcactcgcttccacacccgtggcgtgaacgacgacggccatgtgtccaacttcgtggagacagagcaggttggcagtggcaatgacccctggtc

SEQ ID NO: 882575 - DNA, 99 bp, Homo sapiens
agaagagatgcctccccaggagctcacccggcgactggccacagtgatcactcatgtcgtgagaagattgctcacgtctggcatcgtgattcaggtgtt

SEQ ID NO: 882576 - DNA, 98 bp, Homo sapiens
gccacgactgggatcctacgtgcatgaagatggacgaggtcctgtacagcatcgccgagaaggattacagtttaaagacaatttctgtgatcaagttg

SEQ ID NO: 882577 - DNA, 75 bp, Homo sapiens
gcctccgaagatgggggatttctacgacccggagcacccgacccctgagccttggagtaccttttcaagttcatt

SEQ ID NO: 882578 - DNA, 113 bp, Homo sapiens
gtttcggaatagtctcaagatgctgcttactggtgggaaatcaagatccgtacgggtcgatccacttgacctgtttttacgacttgatttcccaccagtaagcagcatcttga

SEQ ID NO: 882579 - DNA, 99 bp, Homo sapiens
ctatacaacaaaacaggtcatcactaagaaatcaggtgtagttctgctgaatcctattcctaaggaattaagtagactggctggacagattcgaaggtt

SEQ ID NO: 882580 - DNA, 99 bp, Homo sapiens
gaaccagaagatcgagagcctaactttgcaaccattggtctgcaggacatcactttagatgatgaaatggaatctagttcatcagactactataataaa

SEQ ID NO: 882581 - DNA, 99 bp, Homo sapiens
ctcgtccacgccttcaaaggagtcctgggggagtgggtcctcccggttccccagttttgccaccatggcattcagcagcacaacctctgcctcctgggt

SEQ ID NO: 882582 - DNA, 98 bp, Homo sapiens
ctctgaagagaaacttcctggaactgaccgaattaaaatttatacttcgcaaaactcagcaattttttgatgagatccaggaggctgcaagccagggc

SEQ ID NO: 882583 - DNA, 98 bp, Homo sapiens
gagaagccagatcccagggcggacaacgagaagtcgtcagatatttctccctcgagtggctgggaaacttggcaagagaccagaggacccaaatgcag

SEQ ID NO: 882584 - DNA, 98 bp, Homo sapiens
accccatcaaaagtaggaagctactcagagtattacagagttgctgatgattcctctgatcatgtcagtactttatgtctgggcccagctgaacagag

SEQ ID NO: 882585 - DNA, 99 bp, Homo sapiens
aataaagttgtggaatatgttaaaggtctacagaaagaagatggttcttttgctggagatatttgggcttcatgtaaaggacctgaatgagaccatcca

SEQ ID NO: 882586 - DNA, 99 bp, Homo sapiens
cagaggttgcccccccaaccagacccaggactgtgtgcagagttcccggacagattgaagtgctaagaggctttctaggcgaagctggagaagtcactg

SEQ ID NO: 882587 - DNA, 98 bp, Homo sapiens
acaacttgcagctcatctctattgatggatttccagatgtgacttgcactcagaagatcagtggtcaacttcagaagctcttccacgcttagatcatg

SEQ ID NO: 882588 - DNA, 99 bp, Homo sapiens
ctccagtcgcgcacaagtgttatctctgtaccgggcgatgctgagagagagcaagcgtttcagcgcctacaattacagatggagtctcactctgtcgcc

SEQ ID NO: 882589 - DNA, 99 bp, Homo sapiens
ccacaatgggacactgagctttgtggaagcatttggcggcataccaccctgcactgtgagatagtggccagaactatagtgccagtagtaaaggtgaac

SEQ ID NO: 882590 - DNA, 99 bp, Homo sapiens
ggtctcttttgaagtcacattatgaaagaattctctacccatatgagcttttccagtctggtgtgagccttatgtagagacggagtttcaccgtgttag

SEQ ID NO: 882591 - DNA, 99 bp, Homo sapiens
attacacttcgactctcaaagcaataccaggatagctgttgtttcagagaaaggtttatgaaaaccccagatgaaatcatgagtggccgaacagaccgt

SEQ ID NO: 882592 - DNA, 99 bp, Homo sapiens
ctcggtcctgtttcgacagcgaacatgtcgcggcctgtcaggagggtgcatctgcccggaagactcagactcctgcagcccagccagtaccaagaccag

SEQ ID NO: 882593 - DNA, 98 bp, Homo sapiens
ttttgtcttggaggtggcattgttgggagcgctgttttcgtgatcttcagaccccaggttctttgtgtaggaagaatgatgatggagacacagttgtt

SEQ ID NO: 882594 - DNA, 98 bp, Homo sapiens
gagcaccaaaacacactggaaacaaacagtatttctactggaaaaaccattttcagttaaagcagattcctcctgcatggaaaaactactttcaaaag

SEQ ID NO: 882595 - DNA, 98 bp, Homo sapiens
gaggcggaggcagaggtggaggcgctttgaaagaacaagttgaaatcatcgcagaaggataaagttcgtcagtttatgatcttcacacaatctagtga

SEQ ID NO: 882596 - DNA, 99 bp, Homo sapiens
tctgggctggagcaaccctcctgtggggtcaggttggtgacattggtccatcacatgggtggagttattcgaaaagactttaattcaaaagttacacat

SEQ ID NO: 882597 - DNA, 112 bp, Homo sapiens
actacatccagcacgagtgggctcggttcgagatggagcgggcgcactgggaggtggaacgggccgaactgcaggtaggagcagcgcttagaccagccttcacttcagagac

SEQ ID NO: 882598 - DNA, 149 bp, Homo sapiens
gaacaaagagcttataaatacattaggacctggaattcagttgtcgagccaggacggtgacagcgtttaacaaaagctggactggccattatggaggaggagctgcagcattcccattgtgtgaattgtgtcagtagacggtgcatgac

SEQ ID NO: 882599 - DNA, 99 bp, Homo sapiens
gcggcagcgccagcccggcgccccctcccagctcccagcgagtcaactaattcatgaccgaaaatgtattagaaaattgtcatctggagaaactgtcac

SEQ ID NO: 882600 - DNA, 99 bp, Homo sapiens
cattacaacaataccttcttcaattggctgaaatggccataagtgcctgaatgggtcgccaggccatcatacacaccatcatagtagggaagatggaga

SEQ ID NO: 882601 - DNA, 99 bp, Homo sapiens
gttcattagtgacctgaaaactcaaagcgtaaatgcttcagagccgaggttctcctgaaaagaaagctgaacattcatctataaatcaagaaaatggca

SEQ ID NO: 882602 - DNA, 99 bp, Homo sapiens
cgagggtgacgctcgctccgctcgtcccgctcgtcatggcctacccgggatacggaggaggggttttaaaatcaaagatgggaaaatcggagaaaattg

SEQ ID NO: 882603 - DNA, 99 bp, Homo sapiens
ccaacttccaacaagatgtgggcacaaaaactaccattcgcctgatgaactctcagttgattatggaagattcccacaagagtaccacgtcagagacag

SEQ ID NO: 882604 - DNA, 99 bp, Homo sapiens
gggttcttgtcttggccttcatacactatggccttgaatagccattagaaaaaactgttcgaccagggaagttcagagtccccagagaagtcaagttgt

SEQ ID NO: 882605 - DNA, 99 bp, Homo sapiens
cctgccctgctcctggtggcacccagtggcctgtactactgcaaacggggattcagcgtccgatcctttggaacagggactcacgtgaagcttccagga

SEQ ID NO: 882606 - DNA, 99 bp, Homo sapiens
gtcatcaagccctttgccaccattccttcaaatgaggactgtggaaactgaagtcattgcagagtttggatctgtcattcaatgggatattgcaaatag

SEQ ID NO: 882607 - DNA, 99 bp, Homo sapiens
tctatctgggaacaggataaaaagcaaccagatcagtaaactgcagaaggaatttaaacgtcatatgaaaagctactgaagtatgaccactacctagtg

SEQ ID NO: 882608 - DNA, 99 bp, Homo sapiens
gtttgacaagagtggaaatggagaggtgacatttggagcttcctggacgatttaacaggtcctcaagcgagtcttcaaagaagtgaaaagaaaatggat

SEQ ID NO: 882609 - DNA, 99 bp, Homo sapiens
catttttctttgacttcagaagactgtttgcgcatggctttggcaatcttttgggctctctcctcaggagttaattcaattgaggaaaaagatcttccc

SEQ ID NO: 882610 - DNA, 99 bp, Homo sapiens
catgagtgatgtggaggaaaacaacttcgagggcagagctggaggctcccaggtgattttcacaaatcctttagaaatcgtcaagatccgtttgcaagt

SEQ ID NO: 882611 - DNA, 99 bp, Homo sapiens
tccctggatccagtgctactgctacaaataagacggtgtcttgctgtgtcactcaggctggagtgcagtcgcacaacctcagctcactgcaacctctgc

SEQ ID NO: 882612 - DNA, 99 bp, Homo sapiens
caggagtccagcagatgataaaggcccttggcagagactgggtctgtagttaaaacccatcctttatactcattcttctcactggctgtcactcggacc

SEQ ID NO: 882613 - DNA, 99 bp, Homo sapiens
cccaaaactacagttctgtcactcacttacacagtattgggaaatctgtgaaagatatgagggaaggcaccattggagatatggctatcctgggtataa

SEQ ID NO: 882614 - DNA, 99 bp, Homo sapiens
ctgcgagggcgctgcacaacctggcccagcaggcacccgagttcagcgccacgcaagatgtgactccctgcatgtctcctctgccacatgacagtcctt

SEQ ID NO: 882615 - DNA, 99 bp, Homo sapiens
gatctcttgcatattccgctccagaaattctgcttggtgatgagtatgatgcacctgcagtagtgatattctaatggagttcctgctcaatgtcaccac

SEQ ID NO: 882616 - DNA, 98 bp, Homo sapiens
ccggatgttcggtgcagctgccagatccgctgatctagtgcttctcgaaaaaaaccttcaggcggcccatggcctatgaaagagacaaccagcaccaa

SEQ ID NO: 882617 - DNA, 99 bp, Homo sapiens
ggggagcggcgttggaggccaccgtttccaggctactgcagcactggggtgtcagttgttggtccgacccagaacgcttcagttctgctctgcaaggat

SEQ ID NO: 882618 - DNA, 99 bp, Homo sapiens
gactgcaccactgcactccagccctgcgacaggcggtcattgctctcgctgggtccaagcagcaggtcctggctgggtagactctccgagtgattcagg

SEQ ID NO: 882619 - DNA, 99 bp, Homo sapiens
ttgtccacgacaccggctacttctcagctttaccatccctggaggagacctggcagcagaataacaagcctttgtattcatttgaagataatgcagact

SEQ ID NO: 882620 - DNA, 99 bp, Homo sapiens
gtcgtcctgcaagatgggttactttaacatctcctcctgatgagcatctcccgatgggatgatgtaggcctggatcggttcggtcacatactcagagtt

SEQ ID NO: 882621 - DNA, 99 bp, Homo sapiens
tcttgataaaaagagatgtggggggattctcgacctgctaacagaactggaccttttcggtacttcctatttaacagacattgtgtggtgggctggcac

SEQ ID NO: 882622 - DNA, 98 bp, Homo sapiens
ttaaatctgtcgtttgaatttaggaccacctcgtggcacgtctagtgatgaaatgtgcaacttatacattatgtattacatggaagccaagcatgcag

SEQ ID NO: 882623 - DNA, 99 bp, Homo sapiens
gcaaaggtaatcagagtgcgggcttgacttcggagttgccaaactgttgaaggactccaggaagcatttcagccagctgatccatggaggggtacatgt

SEQ ID NO: 882624 - DNA, 99 bp, Homo sapiens
aagaattggccaaagaagttgagaaaatgggagcagttttcatggatgcccctgtttctggtgctcagaattctgcaaatgcagattttgcaaactttg

SEQ ID NO: 882625 - DNA, 99 bp, Homo sapiens
caaagcgcatagctggtaaaattatacctgctatagcaacaaccactgctacagtttctggcttgatttattaactccaaggcaagaagcagttcctgt

SEQ ID NO: 882626 - DNA, 99 bp, Homo sapiens
gcaacagccactagtgggtttgccagtggaaataacgaaggaggcccaacttcattcaataaggagcctgacggatttatcccagacggtagaacaaaa

SEQ ID NO: 882627 - DNA, 98 bp, Homo sapiens
gcttcttctggaagaccagccaacagacagtgacaataccctcccctcccttgggctggacccctctctacagctaggagccaatggcagaagacaaa

SEQ ID NO: 882628 - DNA, 99 bp, Homo sapiens
ctgtctggactgagcatttctctgacttgacataacttcccatccagccaggagtctgcactcttcagtctttgcagctcctctggtgcaagtgtggta

SEQ ID NO: 882629 - DNA, 99 bp, Homo sapiens
cagccctgctctgcgtcaacgccatcgcagtgctgcacgaggagcgattcctcaagaacagtttcagaaggatcccacttggtcagagactggagaccg

SEQ ID NO: 882630 - DNA, 99 bp, Homo sapiens
ggagctggaggtcatcttctcactctttgacagtaaagagaaccggccaatcaggtcccccggcagagggcagtagagatggccggcccaaggcctcgg

SEQ ID NO: 882631 - DNA, 145 bp, Homo sapiens
gcctctccaaggatggctatggaggatggcaggacttggtctgccttggaggcagtcgtgcccaggagcagatgtggaaagtgagtctgggaagtcttgctgtcatctgcccgtgattatatgcagccatgagctacagaactca

SEQ ID NO: 882632 - DNA, 98 bp, Homo sapiens
gaagactttgaccaggccttgctacggcacattgtgaaggagttcaagagagagcttgtattggttggtgatggtggtactggaaaaacgaccttcgt

SEQ ID NO: 882633 - DNA, 100 bp, Homo sapiens
tctcagtgctgccagagctgagccagtccctagggctcagggagcaggagcttcaggctccctgagccctagggactggctcagctctggcagcactgag

SEQ ID NO: 882634 - DNA, 99 bp, Homo sapiens
tccgaggctcctgcgctcccgcgccgcgctcccctcgcccgcccgggccgccagggaaatgatcttcattggttagcatgtgccttatatgtggcttgc

SEQ ID NO: 882635 - DNA, 98 bp, Homo sapiens
ggaaggtgtgtccggaggtttgcaggggtgcagtgtgtctggtcttatgaggaatatgaagacaaggctggaagacctagcaagccaccctctccaaa

SEQ ID NO: 882636 - DNA, 99 bp, Homo sapiens
ggcccggcaagccctgccgcacagctactactggagcgcgccggctccctatctgggaaacaaacacacagagccgctgaaaacgactgaagagagcaa

SEQ ID NO: 882637 - DNA, 99 bp, Homo sapiens
gttccagtcagcccctgccactgtgagaatgacacaaccatttcctacacagtttgcaccccaggggtatactctagttgaatatgaaacatacaagga

SEQ ID NO: 882638 - DNA, 99 bp, Homo sapiens
aaaaaactgacagcttactccttgtattgattctactcttctctacaaatatagactccgttccctaccacagccttttctgcaggctgtacaagaagc

SEQ ID NO: 882639 - DNA, 99 bp, Homo sapiens
ctccctgaggcagtggcgacagcggcggcgagaggatgaacaacaagttcgacgcatggtgtggacggaaagcaagctcgcagaaccaattctagcact

SEQ ID NO: 882640 - DNA, 99 bp, Homo sapiens
attttcttcctcataattgggagaagactcactggccgaatggcagcagtagatgacttgcaatttgaaggttaaacactttaagatgagaaaaattga

SEQ ID NO: 882641 - DNA, 99 bp, Homo sapiens
acaatttctccaggcaagacttcacggtaatatgctttggctttctctggatctacaagtgagtaagcagaaataagctgtgccagggtgtgaatatct

SEQ ID NO: 882642 - DNA, 99 bp, Homo sapiens
ttcgagctggcccaggaggaataccagcagctgcacaaaatgtgtgaggatgacagccgctcgtacgccagctctgttaaacgtttaatgaaagaagcg

SEQ ID NO: 882643 - DNA, 99 bp, Homo sapiens
ggcggtccgtgcgagaggaccaacggagcgctgaggcgggcgttttcttggatgaattgcttgctttggagtgggtaattccagaattgattggccata

SEQ ID NO: 882644 - DNA, 99 bp, Homo sapiens
cataacttcccatccagccaggagtctgcactcttcagtctttgcagtgttatagttttgccgctggactcttccctcccttcccccaccccatcagga

SEQ ID NO: 882645 - DNA, 99 bp, Homo sapiens
cagtgtgccctctgccccctgaaggattcaggatacattaattgtttggtcagaagcagagaactatgatttggctctgagttttcaggagaaagctgg

SEQ ID NO: 882646 - DNA, 75 bp, Homo sapiens
tgtatcaaaactgaagatggtttgaaacagcttcacaagctgatgactatcagccagttcgtctgctcagtaaac

SEQ ID NO: 882647 - DNA, 99 bp, Homo sapiens
ccggaggcgtttctgggcaaaccctggtcctcctggatcgacgccgccaaattacactgctccgacatttttcagttatgggacaaaaatattatatca

SEQ ID NO: 882648 - DNA, 99 bp, Homo sapiens
cgggccatggccgccgccgatgccgaggaacggaaaacagttcttccttcaaagcatgcagtacctgaagtaatagaagactttctctgcaatttcttg

SEQ ID NO: 882649 - DNA, 99 bp, Homo sapiens
gtcatctgaaccttctgagaaaacatggtcaacgtcttgaaaggagtgcttatagaatggactttgtgttttatgccccacgtctgagaatcaacaagc

SEQ ID NO: 882650 - DNA, 99 bp, Homo sapiens
ctgtggtgtacaagctcagcccaaatactccaagacaacagttaggatcaggatttgcctaacatccttccccacggtcatagcagcaatcactttctt

SEQ ID NO: 882651 - DNA, 99 bp, Homo sapiens
caaatcccacagaggcatctgagggagtctgaagatacagtattgctcgtcctcaaagagatctaccaaacccagggtatcttccttgatcagccttta

SEQ ID NO: 882652 - DNA, 99 bp, Homo sapiens
gagaagatggctttaaagaatacacttcaaagtgcctggaagagctgggatgtctggttgagtcctatggcatgaatgtttgccaaccaaccccaggaa

SEQ ID NO: 882653 - DNA, 98 bp, Homo sapiens
acttaatcctactcagaagaacttgtacagagatgtgatgttggagaactatagcaatctggttttcttgggaaagtgactattttaccccacaggga

SEQ ID NO: 882654 - DNA, 99 bp, Homo sapiens
ttaggaggcctggttacagtgttgtgcttctttttcaatcatggagaggttctgatctacaatggccaactggacatcatcgtggcagctgccctgaca

SEQ ID NO: 882655 - DNA, 99 bp, Homo sapiens
cccaggtgtaagcgcagaaagcaggcgaacccgcggcgcaataacgaggcaattgcttttggatcgttccatttacaatggcgcagagaactggactcg

SEQ ID NO: 882656 - DNA, 99 bp, Homo sapiens
gggagtctccgcgtcccgctcgctgggagagaggtacctctccttttccctctccctttccctaaggtctgcttagtggcctatcttggcttgtttatg

SEQ ID NO: 882657 - DNA, 99 bp, Homo sapiens
acttttgaatggcaatgtaaacttccagccatcaagcccaagactgaatttcaattggaattcctagaggacctgtgcaacaacctcttgaggatcgaa

SEQ ID NO: 882658 - DNA, 99 bp, Homo sapiens
gcggtggtggcttgtggtgcggcctcaccatacaggaacagggcagacgttagcgtgagtgatcactctcaatcccgggctacgggcgcacctacttga

SEQ ID NO: 882659 - DNA, 99 bp, Homo sapiens
ttacaagagaaactttatgtgcctgtaaaagaatacccagattctcaaaccatgaattatgtgggacagctggctgggcaggtgattgtcactgtgaag

SEQ ID NO: 882660 - DNA, 98 bp, Homo sapiens
tgtgatattgctaatccagcctcgcttgatgaaatggctaaacaggcaacagttgtcctcaattgcgtaggaccaaaaaaagcttggccagaccacaa

SEQ ID NO: 882661 - DNA, 99 bp, Homo sapiens
aggaaccggcccagccatgtctgggattttgtgtggatgagggctcggctacagcaagaagtagaggagcagctcaaaaagaaatgtttcactctgctc

SEQ ID NO: 882662 - DNA, 99 bp, Homo sapiens
tgacacggccaccctactgcctggaggccggggagccgacgcctggccccttcacagatgtagtcactacaaatcttaaattgcgaaatccatcggata

SEQ ID NO: 882663 - DNA, 98 bp, Homo sapiens
ggattctggcatcagggaggctttcagccggagaagcgagtttcagctggatgctgggcagttttatgctaaatataaagaaacaagattgaaggaaa

SEQ ID NO: 882664 - DNA, 75 bp, Homo sapiens
ggttccaggtgcccaccgcgcactcggagatgcagccgctgagacacctatggctgccgatgaaggctcagcaga

SEQ ID NO: 882665 - DNA, 98 bp, Homo sapiens
caaaacctggagaagcaaaagaaacccatgaagacttcctagagaattcacatcttcaaggacttccttcgctgggcatctggctgggattcttgttg

SEQ ID NO: 882666 - DNA, 98 bp, Homo sapiens
aggacttctgaaggtgttcttcggaatagaaagtcacaccattataagaaacattaccctaatgaggtgggtttggaggatttgggacaacatctaca

SEQ ID NO: 882667 - DNA, 99 bp, Homo sapiens
aaaagcgtcaaactcaccaaaaacaacatctttccagaaagagaatttaagggacgctgtgaagcaatcatggatgcaatgaagagagggctctgctgt

SEQ ID NO: 882668 - DNA, 98 bp, Homo sapiens
ttcatgttccagtgcctcgagcgctcaggatggaggaagactcgatccgcctgcctgcgcacctgcgtagcaacacaagtcggaatagaatggaacct

SEQ ID NO: 882669 - DNA, 98 bp, Homo sapiens
agcaagtatgttctcagaagctatacactcattatctgatacttgtaatcagtgctcttacagatggaaggtgggggccagctcctaggagcactgca

SEQ ID NO: 882670 - DNA, 100 bp, Homo sapiens
tctggataaggaccttacatagctgggtgaccagggcaccataggtcagggtgaagagctcagagctcagtttcctgggcaggtactggtccttatccag

SEQ ID NO: 882671 - DNA, 99 bp, Homo sapiens
attcagatggagaatatatggctggacagctagctgcttatggctataaaattacagattttggactcagcaaggagtcagtagatcaagaaaagaagg

SEQ ID NO: 882672 - DNA, 99 bp, Homo sapiens
ccagttcccagatttggaggcactccaggctgaccaggggtcattgccactgccaacctgaactgtagagctgatttccgatgcaaagccgcctgtcaa

SEQ ID NO: 882673 - DNA, 99 bp, Homo sapiens
ggcaccaaatctggcctgggggcccgagaagcttcctctcagggtaagcttgatgattaccaggaacgaatgaacaaaggggaaaggcttaatcaagat

SEQ ID NO: 882674 - DNA, 98 bp, Homo sapiens
attccagcactggactcatggaggctgagcatttattcaggtgctgtccctggacaccaacatcacaaaccaggtgaataagctgaaccgagacctgc

SEQ ID NO: 882675 - DNA, 98 bp, Homo sapiens
tataatcacagcacattcagaaaaaatacttgcttcagaatctatacgagctgctgtgaataggcgcatcagaggggcgaagatggcttaccagtcca

SEQ ID NO: 882676 - DNA, 99 bp, Homo sapiens
tcagtagaaaacttcattgcagaattgctgcctgacaagtgttatttggaagatggagcttcaaagggtgcctggctgaaccggtcaagtattattttt

SEQ ID NO: 882677 - DNA, 99 bp, Homo sapiens
gataatgtgacagagcagaccaatcacattattattcctagttatgcatcatggtttgattataactggtgatcataaggtccacagattattagatgg

SEQ ID NO: 882678 - DNA, 98 bp, Homo sapiens
accactgtggagaacaaatccaagattagcacagacaagttggatggcttgaggactggtactaaaaggaaacgtgactgggaggccattgccagcag

SEQ ID NO: 882679 - DNA, 99 bp, Homo sapiens
gtggcagagagggggctaaagagcgtcgtgtggcagatccacaagaatcggaatgtcagttaatgctattcgcaagcagagtacagatgaggaagttac

SEQ ID NO: 882680 - DNA, 99 bp, Homo sapiens
ctgcgtttccctgctgacttccggggggtgctctttcttctggagcttccaatatggctttaggtgcataacaaagcccttctccaaagaggacgctct

SEQ ID NO: 882681 - DNA, 99 bp, Homo sapiens
gcattggttggacaccttttaaaaggaacatgcttttgaaagcagccagaaatataaagaaggcaaatacatcattgaactagcacacatgatcaagga

SEQ ID NO: 882682 - DNA, 99 bp, Homo sapiens
ttgtgtgcatcaacagtgatggactcctgatagttcaggatgcttcagagagggcagcacttatacctggtggtctttctgatggtcagttttattccc

SEQ ID NO: 882683 - DNA, 98 bp, Homo sapiens
taaaaatcaacaagaaatcccatcataccttaatgatgaaccaccagaagcaaaagatacagatattgtggatgaagccatctattacttcaaggcca

SEQ ID NO: 882684 - DNA, 99 bp, Homo sapiens
cctgtgtgagcagtctctggacaagatgaccacactccaggaatgccagtgcatcttttgcacagctcatgcagccagtaaagatcccagagaagttcg

SEQ ID NO: 882685 - DNA, 99 bp, Homo sapiens
ggtttctttacagtaatttcaacagaagagtgagagatggaacccgaagaagaaaggattcgttacagccagagattggctggagtgcaatggcgcgat

SEQ ID NO: 882686 - DNA, 99 bp, Homo sapiens
agaagaatggaggaccatccataattcctatctttaaaagaggtttcaggcacagaactgtatatccaataatagtgaaatggatcccactaattatga

SEQ ID NO: 882687 - DNA, 98 bp, Homo sapiens
ccacagccagacctatggcaatgggtccaagtgcgaccttaatgggaggccccgggaggccgaggttcgggatcagggagcttccaaggcatttgata

SEQ ID NO: 882688 - DNA, 98 bp, Homo sapiens
ccaaacaagtggtggactggactagaggtacaagaaaattccccaggacacagagctggtttggagcctttctttgattttattgtttctattaatgg

SEQ ID NO: 882689 - DNA, 99 bp, Homo sapiens
tcccgtgatcctttgctattagcaataataccaaaatatcttcgtgcttccatgactaacttggtcaagttgtccaaccaaaatctagtactttgctat

SEQ ID NO: 882690 - DNA, 99 bp, Homo sapiens
ctgggacctgggaacctactgtggggccgcggccggaccgagcgcctcgacctcggtctgagctgtcagtggtagctataggaattaacatatacagaa

SEQ ID NO: 882691 - DNA, 99 bp, Homo sapiens
tcgcgattacactggatcagaaacaggccatggagggacaggatccggaggcgccagctcaaccctcctcagtgggtagtgcacttccacgaagacgct

SEQ ID NO: 882692 - DNA, 99 bp, Homo sapiens
cccgcccagccgggccctcaagcccagtcgggactcgagcctagggaggcgaggttcccgcaccggatagcactagaaagtttgggatttggctcttac

SEQ ID NO: 882693 - DNA, 147 bp, Homo sapiens
agtactgcccctcttacaacaagagtcctcaatccaacagcccagtgcttctgtctcgactgcactttgagaaggtggtggttgtccaggccatcagtgccctgtgtcagaaatatcctcgcaaacacgccgtccttatgaacttcc

SEQ ID NO: 882694 - DNA, 98 bp, Homo sapiens
tatcactactgtgttgtggatccccaggaggtgttcaaactggatccaaacaataaagaaggccctgtattaatcctgggaaggagcatgcaaccagg

SEQ ID NO: 882695 - DNA, 98 bp, Homo sapiens
acttcatcaactcctcgcataacacctatctcactggtggcagcctcggtttcttcccctcctccctggcctacagcccctaccagtccggcgcgggc

SEQ ID NO: 882696 - DNA, 99 bp, Homo sapiens
cagtttcttccggatggcagccattgctgcccggagttttcgcgcgcgcgctcgctcgatcgctcgcttttccccctctcgcgctcgttttctttcttt

SEQ ID NO: 882697 - DNA, 99 bp, Homo sapiens
gccaaggagccagacttcctgtgttaactccttcctctgccactttttaccttggggacctcaggtacatggaaaacttggggatttcacaataatttc

SEQ ID NO: 882698 - DNA, 98 bp, Homo sapiens
gtgaacctggaccaggaggaggttttcaggaccaaaattgtggaaaagtcactctgatcagcttgaacgggtctttttacgacttggccatgctgaaa

SEQ ID NO: 882699 - DNA, 98 bp, Homo sapiens
tcagtatccaccgacagcattccaaggccgctgtgctcgctgtggagaaaacgtagttggggaaggtacaggatgcactgccatggatcaggtcttcc

SEQ ID NO: 882700 - DNA, 99 bp, Homo sapiens
tgtcaagacaacagtgatgaggaaagctgtgaaagttctcaaggatggagaacctgttcatcaaccgcttcatgcacatgttccagtcttcttggaatg

SEQ ID NO: 882701 - DNA, 99 bp, Homo sapiens
agaacgactgcatctttgacaagtttgagtgttgctggaacggttcggatagcccacctcgctcgcagacaccacaagataccaacagagcttctgaaa

SEQ ID NO: 882702 - DNA, 98 bp, Homo sapiens
agcagacttgggtaatgaagagagaaaacaaaagttcttgagacttatgggtgcaggaaaggaccacagccgctttgtcaactgtgtgcgattctctc

SEQ ID NO: 882703 - DNA, 99 bp, Homo sapiens
gttctcccaaaatggcttgtctctggcgaccctttcctctatatctttttctgaccgatgtggaaacatagaagactggctgtagtacatgttttcgtc

SEQ ID NO: 882704 - DNA, 99 bp, Homo sapiens
tgtatcactgtttaatgatacctgtgtgagatggcaaataaactcaagaagaataaaccccaagatctcatatgtgacagtctcactctgttgcccagg

SEQ ID NO: 882705 - DNA, 98 bp, Homo sapiens
aagaggtatatcaggtgccaccatcagtgcagagaagcattgggggaaccagtgggccccacgtgggtaaaaaggaacatctaaaggcctttgatgat

SEQ ID NO: 882706 - DNA, 98 bp, Homo sapiens
ttgaggaaaaaataaagaggagtccgttaactatctgttatccagaatacacagaaaatccatcctctcagtattggaaggaagtggcagaaaaacgg

SEQ ID NO: 882707 - DNA, 99 bp, Homo sapiens
gtgaaattcgcctgtgagctggaaggaaacagggaaattcaactactgaggaggttacggcacaaaaatgtcatccagctggtggatgtgttatacaac

SEQ ID NO: 882708 - DNA, 99 bp, Homo sapiens
ggccagcatcatcctgataccaaaacttctataagttattcctaacatgacccatgaagccatataattgaagtacagcagttgctcaagaacaaagtt

SEQ ID NO: 882709 - DNA, 99 bp, Homo sapiens
ggtataaatgatctcgtcactcctttctttgtggtcttcatttgtgaatacatagaacctgtggcatattccttggagtatctccaggttgagaattca

SEQ ID NO: 882710 - DNA, 99 bp, Homo sapiens
ctggtatctatgaggccctagagctccgggacaatgataagactcgctatatggggaaggaggcatttcatccttcatgaagccattcaggattttgaa

SEQ ID NO: 882711 - DNA, 99 bp, Homo sapiens
gaaacatgctgagcctttgacagaatcttttagctgaaaaagtagagcagctgatggaatggagttccagacgctcaatcttccgaatgaatggtgata

SEQ ID NO: 882712 - DNA, 99 bp, Homo sapiens
cacctgctagtgctcaagaccggttcatcatgcctagtggcgtataagaagaccccgccaccggtccctccacgcaccacttcaaagccgttcatctca

SEQ ID NO: 882713 - DNA, 99 bp, Homo sapiens
ccccattatttcgaggaaggaattcactgagacttttttgacggagagggacaaacaatccaagtggagtggaattcctcagctgctcctcaagctgca

SEQ ID NO: 882714 - DNA, 99 bp, Homo sapiens
atgtgtgtgcgcgcgaaggagcggaagaatggcagtgctcaaactcaccgaccagataaggtgaagaagggcggcccggggagcgagtgcgctgagtgg

SEQ ID NO: 882715 - DNA, 98 bp, Homo sapiens
tttttagtccattgactatgcagcctaatgtatgaaagttttcaagacgcctacaagtggaaaatgcactcctcccagccaaatcaagcttcgccaga

SEQ ID NO: 882716 - DNA, 98 bp, Homo sapiens
gttactgagtttggtgattcagcttgctttactctttcattgttgggacatgtatattggttttgcactgattgcaaaaataaagtcctccgagcata

SEQ ID NO: 882717 - DNA, 98 bp, Homo sapiens
ctctatgagggatgtgtggacactgcactgaagacagttggttgaagccatggataacagaacccacagatgcagagggctgactgtacaagtctgtc

SEQ ID NO: 882718 - DNA, 99 bp, Homo sapiens
caagaagaccattcagatgggatctttccggatcaatccagatggcagccagtcagtggtggaggtggccaaagcattctggatggcaatcgggggaga

SEQ ID NO: 882719 - DNA, 141 bp, Homo sapiens
cttcctccatcctggtattttttggagcttccatcctggttcttccaaagtgcccggacccaaaacaggaatctgccatgagtcctgtgcaggttgctggggcccaacggagaagcactgcttggcctgcagagatcccct

SEQ ID NO: 882720 - DNA, 99 bp, Homo sapiens
ctgcccaccaccttcgacaccaggcagaagttggtagcagggattctgtctgtgctgtcggtgatccagggactgtcttcgtctgggatggggtgtaca

SEQ ID NO: 882721 - DNA, 98 bp, Homo sapiens
tggatatatcttccttgacagcaaaggtctatgttaacaatgaatgggcaaccagtgttggggaaggagggagctttggagaacttgctttgatttat

SEQ ID NO: 882722 - DNA, 99 bp, Homo sapiens
atacaagtcaacagtctagcagatcagccagtctctttcatcatcaagcagacatactcaagggagagtcccgtattctcagagtaaaagttgtttctg

SEQ ID NO: 882723 - DNA, 98 bp, Homo sapiens
ggatgcagcctttggactcaagtcgtgagatggagaataaagaaactctcaaagggttgcacaagatggatgatcgtccagaggaacgaatgatcagg

SEQ ID NO: 882724 - DNA, 100 bp, Homo sapiens
aatacgctgttcccagtgatagtgctttgctttttcatagataagcttcctccttgcctttcgaagctctcctttctggttgatgatgggaacagcgtat

SEQ ID NO: 882725 - DNA, 99 bp, Homo sapiens
gtcaacattagcatgaatgaagtccccgtctgtgctacgcttcacagttcctttgatccccatgaggcagtgttcctgcctccaaaatgccttttccac

SEQ ID NO: 882726 - DNA, 98 bp, Homo sapiens
tacaatgaagtatatgcagaggaggtcccacaggctcctgccctggactaccgagctcttccgccctctctggatgagggaacagaagtggaggaaac

SEQ ID NO: 882727 - DNA, 99 bp, Homo sapiens
aagcagagacaccaggacagaaaagacagtgttctgctttcatggagttcacagaagagtcgaggaggcaaagggtggaggttatgaaagtgaagatgc

SEQ ID NO: 882728 - DNA, 99 bp, Homo sapiens
cagaactggctggaaaagaaggacgtggtgggaagagcaagagggcccaaactagagtgaaattgaactatttggatcagattgcaaaattctgggaaa

SEQ ID NO: 882729 - DNA, 75 bp, Homo sapiens
gggaacgcatggaagaaagaagagcttattttgacttgcagacacatttgcatttgctggtctggcctttgcgtc

SEQ ID NO: 882730 - DNA, 103 bp, Homo sapiens
cgatgatgtgcagaatgttctcgatctgtgtgcctgccttccgcaggtgggagttgcaccatgccgtgaaggtctgcagggaaatgtcattgatctgcacatc

SEQ ID NO: 882731 - DNA, 99 bp, Homo sapiens
ctagggctggagcctctccagcctcccgcgaagaagacaatagatgtgcatcttcaaatgcagcatcctgtgccaggtgccttgcgctgggtccagaat

SEQ ID NO: 882732 - DNA, 99 bp, Homo sapiens
cctctgatggaggcatctcaggagggacacctggaattggttaaatatttgctggcttctgaagaaatatttgccattgctaaggaattgctaaaaaca

SEQ ID NO: 882733 - DNA, 99 bp, Homo sapiens
aagacctggtgaaggtggaacggggctcccaggacctccactaatcaccagaacaaaatgtgcaggtggtatcttggccaacaaacaaaactgctttga

SEQ ID NO: 882734 - DNA, 98 bp, Homo sapiens
agccacccccgtggtgggggctgtccaggggcctgtcccggagatctattgggaaactgattataaccactcgggcaccatcgatgcccacgagatga

SEQ ID NO: 882735 - DNA, 99 bp, Homo sapiens
gtctgcactctccccatacctttcctctcctgtgtcttcgtatcagattgttgatccatttcagatacttgtggcagcaaacaaagcagttcacctcta

SEQ ID NO: 882736 - DNA, 100 bp, Homo sapiens
caggaagttccttgttttaatgtaaatgaatgttttcagaaggaatccaggccctccattggtttcagctgagcatttacattaaaacaaggaacttcct

SEQ ID NO: 882737 - DNA, 100 bp, Homo sapiens
tgggaactgggaacactggagacctgatttctaactgagcggccggcggccgcgacggtagcgtcagttagaaatcaggtctccagtgttcccagttccc

SEQ ID NO: 882738 - DNA, 98 bp, Homo sapiens
atgatgaggagcaagaggaccctgcggactactgcaaagatgctgtgagagaagtaaggaaatattcctcagttcataccattgagaagagctccacc

SEQ ID NO: 882739 - DNA, 99 bp, Homo sapiens
gctgctacactgaagatgaagcaaggcccaatgacccaggcggtgtaaaaccagtaagtgtacagcttaattctatgctttgtcctgcacctatcctga

SEQ ID NO: 882740 - DNA, 99 bp, Homo sapiens
aggagtctctcctctgatccaggagcattggcaggtcactgaactgatgcaggagcagtcatacctgaagtctgaattgggcctgggacttggagaaat

SEQ ID NO: 882741 - DNA, 99 bp, Homo sapiens
gaaaggaacgcaagaacagaatgaagaaagtcagggggactgcaaaggccaatgttggtgctggcaaaaagttgctgccttcactgaagtcttgaaccc

SEQ ID NO: 882742 - DNA, 99 bp, Homo sapiens
tcaaaaatctggtgaaattgccggcaagagggagttaaggacattccaggcagaggcaagagttcgcagtatgtgcagtgcgtggccgggtgtttgcag

SEQ ID NO: 882743 - DNA, 99 bp, Homo sapiens
cgtgttcgtgctgaataagaagaacaaactgacgcagagtaaggtgttctttgcagaagatgtgggttcaaacaaaggtgcaatcattggactcatggt

SEQ ID NO: 882744 - DNA, 99 bp, Homo sapiens
atatattttggctgtgcctgtgttaaacctaaatcttcaacataataagatatttgtgaaccaaggtgatactgtgcttgtccaccgagttcacagtta

SEQ ID NO: 882745 - DNA, 99 bp, Homo sapiens
agacaccaatggagatctgcctcaatggaacccctgctctggcctacctggcgaatgagatgtgcctggccacacaacagctttctaagcaactgctgg

SEQ ID NO: 882746 - DNA, 98 bp, Homo sapiens
gccaacatcgcggtgcagcgaatcaagcgggagttcaaggaggtgctgaagagcgaggagaacattatacatccatgggcataccaagttggatttca

SEQ ID NO: 882747 - DNA, 99 bp, Homo sapiens
aaacctcaggacttgagtaacagcaacatggcagttgcagtggtgcagaatggctgacctcagtcttgcagatgcattaacagaaccatctccagacat

SEQ ID NO: 882748 - DNA, 99 bp, Homo sapiens
tgggtgacagagcaagactctgtttggagatcagtagaaggaaatttcagtgtgacaagaatgttgacaatccctgtgctatctgtactaggatctagt

SEQ ID NO: 882749 - DNA, 99 bp, Homo sapiens
ccatcaagagcagttgaaattcttaaggatgctttcaaatcaaatgactcacagcagggatgtgtttggccaaatgggagagtggttacaacacacgag

SEQ ID NO: 882750 - DNA, 99 bp, Homo sapiens
caactgtgggatgttcacattcatctcatttgtgcactgaattaagtctaaaattaagcccaccattgtacttaaatatccggttccacttcccaggtt

SEQ ID NO: 882751 - DNA, 99 bp, Homo sapiens
gaaaaacgaccttcgtgaaacgtcatttgactggtgaatttgagaagaagtatgcttggggaacaatgatggtgcacaaaggcttagatttgccttgtc

SEQ ID NO: 882752 - DNA, 99 bp, Homo sapiens
gcatggaaagtcgggggctttcgcccgggtcctcctagaaattccccccgaagaagactcccccacatctggtgccctctggtggtcagaagatgctgt

SEQ ID NO: 882753 - DNA, 99 bp, Homo sapiens
gaccacctggctaggattgctggctctcctgacaccttctcgtggcatccatgtggtttatccagttttctgaaaaaatttagagatgcatgaccggat

SEQ ID NO: 882754 - DNA, 99 bp, Homo sapiens
ggaaatggatttgctttggctctctgcttatcttttttgccaaatactgatggagcacgtgaattgcctctgcttacgttcaggccctgtcctaaaccc

SEQ ID NO: 882755 - DNA, 99 bp, Homo sapiens
ccaggcagtagagctcccagcaggcattgccaatctggacaccagcctggccaacgtggatggagatgcactcacgctcatcccacgtcgcttgcacca

SEQ ID NO: 882756 - DNA, 99 bp, Homo sapiens
aataacgtgcacctttctcatcctgtttatgtccgacgtgcagctgttgaaaaaactgtctgggactgggaacttatgaatgatatcaaaccaatatgg

SEQ ID NO: 882757 - DNA, 99 bp, Homo sapiens
agacggcagtgatggtgctgctctcttagctgtgattcactattattgcccagagcagatgaaactggatgtgaggactcttgtgaagatatgagttgt

SEQ ID NO: 882758 - DNA, 99 bp, Homo sapiens
actgaattggagactgttaggcccagaagaacaattagggtgacgtgtgcattgagtaaacagtcatcctttttgaacttccatgactcagactgcgaa

SEQ ID NO: 882759 - DNA, 99 bp, Homo sapiens
ggcaacaagagtgaaattccatcattaaagaatttgatgatgtctgtgaaatccatgttgttctccaaaatgatgtcacggtagacttccaccagagcc

SEQ ID NO: 882760 - DNA, 99 bp, Homo sapiens
cctcatcgagctcttcgtcaagaagactgtgcagtctttgtaactgatgaagagcaaggctttgtctctaattctgcccagttaaagtgcaggcgttag

SEQ ID NO: 882761 - DNA, 99 bp, Homo sapiens
tctggactttgcacacctccaggagaagaacccagaaaattgatcagttctaaaaaaccatgccccacctgttaaaaaacccgctccagcacccccgaa

SEQ ID NO: 882762 - DNA, 99 bp, Homo sapiens
cgggaagggccactgcttgatggggacatgccccacactgcaggagcagtgcacagagctgtggggaccaggtatcatcttcaccaaataaagaaagta

SEQ ID NO: 882763 - DNA, 99 bp, Homo sapiens
gggaaggcagcatggcacgctgcatggagccaaaatcgggtctgagactgtggcagggtataccattcctccaggacatcaggtgtgtgtttctcccac

SEQ ID NO: 882764 - DNA, 99 bp, Homo sapiens
gcgctgcgcagttttgttctgctccagctgttcgaaggtgatccaggttgactatagtcaatggggccaatggagccaagtgtatggaaacccacaaca

SEQ ID NO: 882765 - DNA, 99 bp, Homo sapiens
tgtcagccagggctgaacccccgcagagtactattaatcccgtagatgcaatatatcaacctagtcctttggaacctgtgatcagcacaatgccttccc

SEQ ID NO: 882766 - DNA, 99 bp, Homo sapiens
tcatggcggatggccccaggtgtaagcgcagaaagcaggcgaacccgcggcgcaataacggatgaagtcattgctgtttccgaaaaggtgattgtgaag

SEQ ID NO: 882767 - DNA, 98 bp, Homo sapiens
gggaagtcatttctactggacttcatgcttagatacatgtataacaaggccaaatttgagtttcatcatggtgactatgaaaaacagtttctgcatgt

SEQ ID NO: 882768 - DNA, 101 bp, Homo sapiens
gggcccaagaaaaagcacctggacttggactgttcatcaccattcatgacaaaggtcatcttgcaacaatgctgaattcttggccagaagacaatattaag

SEQ ID NO: 882769 - DNA, 99 bp, Homo sapiens
aagagcccagctagcaccttcgccctctccagccaggtacctattgtcaaaagagtggggaatggtgaggaaacgccgatgattggagacaaagtttat

SEQ ID NO: 882770 - DNA, 98 bp, Homo sapiens
atttgctacagcatcccacattaagtcaacgtcctcgaccatgtttaaacattgaagatgatccagatattcatgaaaaaccatttttgagttctagt

SEQ ID NO: 882771 - DNA, 99 bp, Homo sapiens
aaggaagccccttaaatgccgcaccctacggcatcgaaagatctttaatctcatgaagtacgacagctacagccgcttcttaaagtctgacttgttttt

SEQ ID NO: 882772 - DNA, 99 bp, Homo sapiens
gcagattccccaggaggacatggacgacagtcatcaccaccatgaccaccttgaagaagaacctggctgacgaggatgctgtgtcttgcctggtgctgg

SEQ ID NO: 882773 - DNA, 99 bp, Homo sapiens
catggtcaaccccaccgtgttcttcgacattgccgtcgacggcgagcccttgggccgcgtctcctttgagtttctccacagacactacccaaagcagtc

SEQ ID NO: 882774 - DNA, 99 bp, Homo sapiens
gcagaaaatagcagccaggaaccaagaaaacttgatggtgagaacaagaccaagattggaaagccagcttcagaggagggaattacagcaaaaattgaa

SEQ ID NO: 882775 - DNA, 99 bp, Homo sapiens
gctctgcttcatcccactattattttggcacaacaggaagggcgccctgcgtccggcagaggaggcgagcatcccgctcaggtgatgaggaacccctcg

SEQ ID NO: 882776 - DNA, 99 bp, Homo sapiens
cacatcaagagatgcttcatgttggttgagagtacagagaggttctgaggggcaggcagaatggccacttcatctgtaatcccagctacttgggaggct

SEQ ID NO: 882777 - DNA, 99 bp, Homo sapiens
gacgctgagggcccatgtgctgaaaatccgaagtgccgcggaaagtggaggtttgctggttggctcccgagcagacagcaggaaagaagaagcccttcg

SEQ ID NO: 882778 - DNA, 98 bp, Homo sapiens
accagaggaactcagccctgattgcgattgcttgtcttactcagctttgcaagtcctatcccgaaggtgctatgggaagcagagatgcaaaatcatcg

SEQ ID NO: 882779 - DNA, 99 bp, Homo sapiens
aagctggccgtggctctcttggcagccttcctgatttctgcagctctgtgtgaaggtaatgaatttgggcatcctgaatggttagacttcccaagaaaa

SEQ ID NO: 882780 - DNA, 99 bp, Homo sapiens
cttgaaaagcccatggccccccagaacgacaagaatgaggtattgcactgcacaggccacattcacgtatatgataccaacagtaaccaacctcagtgt

SEQ ID NO: 882781 - DNA, 99 bp, Homo sapiens
ctccagcacgcggcggttcacgttctcctccagcggcacctccagatggctcttggctttctcggtgcgtgctcccagagtcaggcctccggcgcagcc

SEQ ID NO: 882782 - DNA, 144 bp, Homo sapiens
aagcctgtatcaactctggtatggacacagcttctagtgttgctttggatcttgtggaaagtcagaatcctggccatcgtgtctatcctgttcattgtgctttccaccattgctttgtctctcaatacgctgccggagctgcag

SEQ ID NO: 882783 - DNA, 99 bp, Homo sapiens
actgcacagtggaaggcactttccatgaatactgagaatgccaaagtaaccagatctaacatgagagacattttaaatcctaaggatgtgatcacaact

SEQ ID NO: 882784 - DNA, 99 bp, Homo sapiens
caagtccggctagtacgcgaattggagaaaaagttcagtgggaagcatgtcgtctttatcgctcaggtgtggcctgaagtcactgatcctgagaagttc

SEQ ID NO: 882785 - DNA, 99 bp, Homo sapiens
cttgatccagtatgcttatacagactataatgtaactgcaaactccaagctggtcattatcacggctggggcacgtcagcaagagggagaaagccgtct

SEQ ID NO: 882786 - DNA, 129 bp, Homo sapiens
tctgatttttatattttattcctcttcctatccaatccctgccttttgagtccaggtgatgttaatgttcgtgtgtcaagtctcacactcttgggagctatagtgtccacccacgcacctttacctgaa

SEQ ID NO: 882787 - DNA, 116 bp, Homo sapiens
tacctatctggaaacaacaggcgagacctggagatggacctgtgatctggtactttgtcttcacgggggtgttggccatggtgacctgtgcagttttcctccggctgaactccgtc

SEQ ID NO: 882788 - DNA, 99 bp, Homo sapiens
ttccaacaaaagaatgctgccacagactgaacctccattgaatactccagaaaacagggaatatactgctgaaataatgtttgagtccttcaatgttcc

SEQ ID NO: 882789 - DNA, 99 bp, Homo sapiens
tctgttttgcctgaatacatgatttaaacaagagatttccacagaagtgaaatttcgtgttgtctccatggatgaaaactttcaccccctgaatgagtt

SEQ ID NO: 882790 - DNA, 98 bp, Homo sapiens
gacggcggcctacgagcagctgaagctgtgatggaatatgagaataggattcgagcctactccacgccagacaaaatcttccgatattttgccacctt

SEQ ID NO: 882791 - DNA, 99 bp, Homo sapiens
aagaagttaaaccttcacctttaaatggatgaccatgtcacaatcaggaagaaacatctccaaagacccatctttagcttgtacctccttttaaacctc

SEQ ID NO: 882792 - DNA, 99 bp, Homo sapiens
gatatcagtcctggccgtccttcagtacattagaaaagaatgacagcccatatcaaggcggtgtattctttttgacaattcattttcctacagactacc

SEQ ID NO: 882793 - DNA, 99 bp, Homo sapiens
gccctcgatgtgatacctgccgctctggtttctactcattccctatttgccaaggccaatgaacttccggcagaactaaccaaaaatgaacgtatattg

SEQ ID NO: 882794 - DNA, 98 bp, Homo sapiens
tctataaatgctgcgtctaccttaccctctgacttggaggcagagacccaagcagctggaggctctgtgtgtgggccccatgggtccgcctggagaaa

SEQ ID NO: 882795 - DNA, 99 bp, Homo sapiens
ttcccggctcccaggtttattctcccatagcatgtggttttgctgttactgctcagtgtagtcacaccttgaataagaaatggaaaaccttgggatgtt

SEQ ID NO: 882796 - DNA, 99 bp, Homo sapiens
tgtgttgtgtgctgccacgtccccagccgtgaagctgcatgaagagacgctgacctacctcaaccaaggtatagtggaggattacaagccaccgttcta

SEQ ID NO: 882797 - DNA, 98 bp, Homo sapiens
aattttactttctgacaatgcagcttctcttgcagtgcaggacatggatttgattgacatactttggaggcaagatatagatcttggagtaagtcgag

SEQ ID NO: 882798 - DNA, 98 bp, Homo sapiens
gagactctgtccttcatccgagacagcctggagaagagcgaccagctcactaagaacatggtgactcgaaaagccctgtttcctggtgactctgagat

SEQ ID NO: 882799 - DNA, 99 bp, Homo sapiens
tcagactctgcgaaaggccgagagaagctggtcctgctcacgagagaaaaaggagggaccgacgtcatggttcggtgcctcaagctgctgaaggaattt

SEQ ID NO: 882800 - DNA, 99 bp, Homo sapiens
tgccaccaacagaataaaataaaagatcttcaaaaggagcagaaaactttacagaggaatgttacggcatccggagtcatccctcagatttctctgatc

SEQ ID NO: 882801 - DNA, 98 bp, Homo sapiens
gagaagtgatgaggaaatgaaggcaatgctgtcatatgtgcacatgaacttgaacagatgcagctgattttagaatctattcctgttgtacatgagga

SEQ ID NO: 882802 - DNA, 98 bp, Homo sapiens
taacctcaatcatggccataccgagcaggtggaacctaacttcttgtggaacaagtgttgccagctcagaaggcagtgaggagctgttttcatctgtg

SEQ ID NO: 882803 - DNA, 99 bp, Homo sapiens
acgaaagtttcaaggagtttgggaaaaaccgcgaagtcatggggctctgtcgggaagcacttttccagccattaactccaggctctcgagaatttgaag

SEQ ID NO: 882804 - DNA, 99 bp, Homo sapiens
tggaaattaactgcctccattacactgctgagtcacacacaacgcttgttatgttttcatcacttctctccagaagattagtgggatggtttggccatg

SEQ ID NO: 882805 - DNA, 99 bp, Homo sapiens
tcgtgaacgcgctgcacctctacctgtggctctttctgctgggcctgcccttcaccctctacatgatgaaggatttgggggcagagcacttggcaggtc

SEQ ID NO: 882806 - DNA, 98 bp, Homo sapiens
ggatcaggaagtggagaagtcaagaggacactgaagatcacagactgtcctgttagcctgagcacaccagctcagcttgtggccccctctgttgtagt

SEQ ID NO: 882807 - DNA, 98 bp, Homo sapiens
gaaaccagcccaagctacaaaagtggtgctcaagactgcagtgcagatgacgacaacttccttgtgcccatagcggtgggagctgccttggcaggagt

SEQ ID NO: 882808 - DNA, 98 bp, Homo sapiens
gacattctgaagggaggcaaggaggcggactgagcgctcccaattggggactactccgcagctccccggggccgatttggcattccctgctgcccagt

SEQ ID NO: 882809 - DNA, 99 bp, Homo sapiens
tttatcaaatcgagtcactgtcaatgcctacaccaactaatgttacaattgaatcctataacatgaaccctatcgtatattgggagtaccagatcatgc

SEQ ID NO: 882810 - DNA, 99 bp, Homo sapiens
tgagcatgagcgaagggtgcgcaagaggagggccagcggttacgactttggctacttaatcaaaatcctaaccaactctaacttgcctgaagaagaact

SEQ ID NO: 882811 - DNA, 99 bp, Homo sapiens
ttacagcacgctcaagagcatcctccagcaggtgaaggactcaagcacagagggttcggaaaccgcgttgctgcacggggccccaggggctgcttcccc

SEQ ID NO: 882812 - DNA, 99 bp, Homo sapiens
cacaatcccgggttgtccgggtcctgtcaatgtcacgtgccactgattaatgaacttgaatcagcaatacatcagctgtacaaacagcgagcttcccgc

SEQ ID NO: 882813 - DNA, 99 bp, Homo sapiens
gaataccaagaatacaatccttatgaagtattaaatttggatcctaccaatgatgcgagctcagagtcaatagcatccttctctaaacaggaggtcatg

SEQ ID NO: 882814 - DNA, 99 bp, Homo sapiens
gctgagtggttgtgtggtcgcgtctcggaaaccggtagcgcttgcagcatggattcagagactgtttttgatattcagaatgacagaaatagtatactt

SEQ ID NO: 882815 - DNA, 98 bp, Homo sapiens
ttctctgagatctcagccctccggttcctgggcagagagaaaggcgaaattacaagagtccattgaatatgaagacttggggaaaaataattctgtaa

SEQ ID NO: 882816 - DNA, 99 bp, Homo sapiens
tgtttcgagaggtggagacgctgtatcagtgtcagggaaacaaggggcagcactgaaatacttaccaacgatcgtcaacgatgtgaaattggtgtttga

SEQ ID NO: 882817 - DNA, 98 bp, Homo sapiens
ctgtctgaactctgctcagagggacctgtactgggacgtgatgctggagaactacagtaacttggtctcactggacttgaaacccacatgacaccaga

SEQ ID NO: 882818 - DNA, 98 bp, Homo sapiens
atgattcgtagctaagacttcgcgacacccttgaagctgagaaatggttggatttggtctagggagtcccagaaagaagtagaaaaagagagagaagc

SEQ ID NO: 882819 - DNA, 99 bp, Homo sapiens
acctgccagcaacagcttccttctttgagcttaggcactgggacgttcgggcgggtgcacctggtgaaggagaagacagccaagcatttcttcgccctc

SEQ ID NO: 882820 - DNA, 99 bp, Homo sapiens
acttacacagtattgggaaatctgtgaaagcaacgcacctcttgctttttcctccaaagtatgttatgttaagtttcgtgatccatcaagtgttggcgt

SEQ ID NO: 882821 - DNA, 118 bp, Homo sapiens
gtcaagaggtgcaaaaatcttagctctctcaatctctgtctgaactggatcataaatgacagactaatagggatgccaaaggaaaaatatgatcctccagatcctcgcagaatttata

SEQ ID NO: 882822 - DNA, 99 bp, Homo sapiens
tgtgacctgcatgtactgggggattcgcagggaggatgtcgggacaccccggaagctgggaaatggcaatgaatcgctccctggctaatgtgattcttg

SEQ ID NO: 882823 - DNA, 98 bp, Homo sapiens
caggcccgccgcctccctgccaagttgctgatcatctgggctgtgatccacaaacccggttctttgtccctcctaatatcaaacagtggattgccttg

SEQ ID NO: 882824 - DNA, 76 bp, Homo sapiens
ctcaattcaccacttggatcacaggtgttttcacagtcctgtgtttggtatggagagtgtggaattgcatatgggg

SEQ ID NO: 882825 - DNA, 99 bp, Homo sapiens
tgtctcgctccgtggccttagctgtgctcgcgctactctctctttctggcctggaggctatccagcgctaggaattatctgtgaatgtaggaccactgg

SEQ ID NO: 882826 - DNA, 106 bp, Homo sapiens
gcgaggccgcagagctaaatgggggcctctccagggagtgctctgttcacggctccatcgctgttagtgctggagaatctggtaaaagcaccattgtgaagcagat

SEQ ID NO: 882827 - DNA, 98 bp, Homo sapiens
ttccttaaaagctgcttccagtgggaatccacattaagaagtacaatagcattcgcggagatcccccgagacctcacgctggatgccctgctggagat

SEQ ID NO: 882828 - DNA, 99 bp, Homo sapiens
gaaagtctaagggatatggctttgtctcctttttcaacaaatggctggatctaccatgaaagacttgtgaatccaggaagagagactgactgggcaaca

SEQ ID NO: 882829 - DNA, 99 bp, Homo sapiens
ttgattcacttaagaaaactcagcctgagaatggatatatgattggatgcctgaacaaccaaatatattccaagtggagcaattggaacgcctgaagca

SEQ ID NO: 882830 - DNA, 98 bp, Homo sapiens
gcgaggagacggcgacttctgacaacgagaagtgtttggattgtgagctatttcagaactgttctcaggactcattattttaacatttgggagaaaca

SEQ ID NO: 882831 - DNA, 98 bp, Homo sapiens
atgggatttgcaacgaattcaatgaacattcctgctcttgttggcaaatgagcaagaagaacccatcaggtgattgtcaggcctctgagcccaagcta

SEQ ID NO: 882832 - DNA, 99 bp, Homo sapiens
acgcttctgagctaaaagcttccatgaagaggaatgctttgcaagcaatttctccagccactatggaagttcttatgcgagtattggcagattgtgatt

SEQ ID NO: 882833 - DNA, 99 bp, Homo sapiens
gcaactcggcagcctccacccaccggcccaccctacatttagcgcatcatgtgatccgggtgaactactgagttcttcattatgtctgatggagattat

SEQ ID NO: 882834 - DNA, 99 bp, Homo sapiens
gaattcatctaattttcactgccgggcgaggtgtgagagccctagcatctgaaagtggtcgacttgcgagttggatgaaaactttcggaagagaaagtt

SEQ ID NO: 882835 - DNA, 99 bp, Homo sapiens
gccgggagcggcgctggccccaaggcgctgccctgcgcaggaccatcatggagcagttcaaccctagcctccggaacttcatcgccatggggaagaatt

SEQ ID NO: 882836 - DNA, 98 bp, Homo sapiens
tgagactcaccggaggaagcggcgcgagcgccccgccatcgtcccggctctctatgagaacatgctggtggagctgccctttgcaggcttctttcttt

SEQ ID NO: 882837 - DNA, 99 bp, Homo sapiens
ggggaacatgtcaggcctcactctttctgtattggatttcaagagtattgtccttgattggtctacaaatggtttcttttgatctacaaactcagctat

SEQ ID NO: 882838 - DNA, 99 bp, Homo sapiens
ttctggagcaactggagttcctgggaggaagtcagtggtgtctactatgaaccatcctgtactcagaatgtgaatcatggtgtacttgtggttggctat

SEQ ID NO: 882839 - DNA, 99 bp, Homo sapiens
ctgcaagactgtcgacctaaagcctgactggggcaaggagctgtttggatcagaagatgacatcctttcacccatccctttcaggttttgacatcctaa

SEQ ID NO: 882840 - DNA, 99 bp, Homo sapiens
ttgcggcgcccaccttcgggaggatcaggaaagcgttataatgttgcagatgtgtctgctgccatatgtatgagccttggcctgatatggtttaccctc

SEQ ID NO: 882841 - DNA, 99 bp, Homo sapiens
cctggtctatttttggagaaaattggagatttgataacactggagatcagcaccaaatcccacagaggcatctgagggtgtttgtgaaccgaagtttag

SEQ ID NO: 882842 - DNA, 98 bp, Homo sapiens
acagacgcagcaacaacagcagccggcccttgttaactacaacagaccatctgctgatgaacttattagtcctaaagacattgatcctgtccagcgct

SEQ ID NO: 882843 - DNA, 99 bp, Homo sapiens
gttgacaaggcactgctttttcatgacgctgttgttggcctactgtacccctgtatcgacagtcacctcggagaaccccacaaatttaagagagaatgg

SEQ ID NO: 882844 - DNA, 98 bp, Homo sapiens
gacaaagaccgaaaagaagatgatacaaatgaatttgttagtgctgtgtgctggagggcactaccagatgggacggtcctaaaatctctacacttgcc

SEQ ID NO: 882845 - DNA, 99 bp, Homo sapiens
caaattagtgacaagaagttgtgacccaggggaaaaattagactcaaaaattggagtccttataggaaaaggtattaatctctggagaagacacatcca

SEQ ID NO: 882846 - DNA, 99 bp, Homo sapiens
taatggacagttagtcacccacctacatgttgaggtaggaaatgcagatgtacctgactacagcttgcttaagaaacaagatcttgttccaggcacagg

SEQ ID NO: 882847 - DNA, 99 bp, Homo sapiens
tcaagatgtggatttaccttatcccctcaacaacttttcagtggcaaaaaacatcggttgtgaagagaaagccaaaaagaatgccaacaagcctttgct

SEQ ID NO: 882848 - DNA, 99 bp, Homo sapiens
agctggctctggccaggaagatagctgagcagcagcgtcgccaggaaaagatccagattgtgaataagtggaatacagctctcattggccttatgacat

SEQ ID NO: 882849 - DNA, 99 bp, Homo sapiens
tttagtcgctggtgatcgcagaattccagctcacagatacaaagaagctgttgtagcttatgaaaatgcaaaacagtggcaaagtgtaatccgcatcta

SEQ ID NO: 882850 - DNA, 99 bp, Homo sapiens
tttcaaagaatgtactcgacaccttgcgtttgaatcagcttgggtactgacaaatattgcttcaggaaattctcttcagacccgaattgtgattcaggc

SEQ ID NO: 882851 - DNA, 98 bp, Homo sapiens
tggagtgtgcggcccgataagcgctttcgcttggcgctgggcagcttcgtggaggagtacaacaacaagctattttgaagatgaggaagaagattcta

SEQ ID NO: 882852 - DNA, 77 bp, Homo sapiens
atcagatgttccacgtaataatgctgatagccgcaatggctgaaaatggtgataatgaaaagatggctgccctggag

SEQ ID NO: 882853 - DNA, 99 bp, Homo sapiens
aacgggcatctcctcccagcagctcatgcaacatctcctctggggaaatgcagaagaataaaagccagggatccatctttgtccggatacacgccccgt

SEQ ID NO: 882854 - DNA, 98 bp, Homo sapiens
aacagcttacctgagccagccaagaagaggtgcagagtccagtggtgacatggatgttctcctgacccatcccagcttcacttcagaatcaaccaaac

SEQ ID NO: 882855 - DNA, 99 bp, Homo sapiens
ggagatatacgtgatggtcaatgacaagcccgtgtgcaagccctgctatgtgaagaatcacgctgtgattgactttgaagatgtgattgcagaaccaga

SEQ ID NO: 882856 - DNA, 99 bp, Homo sapiens
gcacacaggaaatggattactctttggatataacaccaccttcaaaaatttctatggaatcgccacttatatatgtttcagttttgcttttgaacatat

SEQ ID NO: 882857 - DNA, 75 bp, Homo sapiens
cacgcaggaggctgcgccaacgtggttgatcatgggtcttcacggcttctctgcccaggggccagaaccgaggag

SEQ ID NO: 882858 - DNA, 98 bp, Homo sapiens
ggagctctgaccgaggcgcctcgctggggcggggaccttgccttgcccggggtgatgctgtggagtcttcaaaaagcccgaccactctggattacaaa

SEQ ID NO: 882859 - DNA, 98 bp, Homo sapiens
gcacgcgagatggagcgccgtgggcccagcactagaagatttcagtcatctgccaccagaacagagacgtaaaaaactacagcagcgcattgatgaac

SEQ ID NO: 882860 - DNA, 99 bp, Homo sapiens
agatcgagagcactgacacggcctgcatcgggcccacgctcaggctaattcacctaaataagattgatcctcatgctccaaatgaaatgctctatgggc

SEQ ID NO: 882861 - DNA, 98 bp, Homo sapiens
atccccatcctgcagcacctcaaatacaaggacagagtgcaagacgatgacttgcaaaatgtcgcagctggaacgcaacatagagaccatcatcaaca

SEQ ID NO: 882862 - DNA, 98 bp, Homo sapiens
tgaagaggagggggcgttccccagaccatggcatctacggaagggtacgtcttcaaataccatctcagcaggctgggagccaaatgaagaaaatgaag

SEQ ID NO: 882863 - DNA, 98 bp, Homo sapiens
taaactgttacgcatatatgacttgaacaaacctgaagcagttgagaaaccaaggcagtatcatgagcaggaagaaacacctgagatgatggcagccc

SEQ ID NO: 882864 - DNA, 98 bp, Homo sapiens
tgtgtctcaaatcaaccacaagctggaggcactggctcaggcgatcagggaagccagagagcagcaccctgacatgtcggtcacaagagtggtggtac

SEQ ID NO: 882865 - DNA, 99 bp, Homo sapiens
tcgcatctccccgacaaacaccacgagaattccgcagcccacacgtgagtgttgaaaagatagacctgaagggattatcacacacaaaaaatgacagaa

SEQ ID NO: 882866 - DNA, 99 bp, Homo sapiens
ggcttttgaagaaaatgtatgtactgacgggaaaaggaggataagcaagtcgaatttttgtcttacggctttcatgagaaggacaagaagccatattgc

SEQ ID NO: 882867 - DNA, 99 bp, Homo sapiens
ttcaagcccggggacttggtgttcgctaagatgaagggctaccctcactggcctgccaggaagctcctggactatgaggtggacagtgatgaggagtgg

SEQ ID NO: 882868 - DNA, 99 bp, Homo sapiens
tacttgaaaaggaagccaacgtagacactgttgacatcctaggatgcacagctttacacagagggatattgaagcacagattcgagaaattcaaggcaa

SEQ ID NO: 882869 - DNA, 100 bp, Homo sapiens
tgatgaagagtatcaggaatttgaagagatgctggaacatgcagagtctgcacaactgtcaccactgactaaagaagagaaaactgcggcagagcaattc

SEQ ID NO: 882870 - DNA, 98 bp, Homo sapiens
tctgaagttgttaccaatggtgaaactacatgttcagaaagatcttaagattgaaagtgatgttcaagaaccaactgaaccagaggatgaccttgaca

SEQ ID NO: 882871 - DNA, 99 bp, Homo sapiens
ttcccacctgctgatggtaatcaccgtgtgtttgcagtaagttgtgagatggaggcacaccctactgcgggatgacttgtgcagaactctacgagaagc

SEQ ID NO: 882872 - DNA, 98 bp, Homo sapiens
tggcggctgcaactgcctgccgcgccgagggaccgccgggcggcggaaagcaggcaggtgacaaacattaccaccccagctgtgcacgatgcagcaga

SEQ ID NO: 882873 - DNA, 99 bp, Homo sapiens
acacgtgttcttcacactgcacatctaccagtaccggatggagaagagcgggaaagggggaagatttttttcccaggaagccatcccgtcagaggggtt

SEQ ID NO: 882874 - DNA, 75 bp, Homo sapiens
ccaacatggggcagaagcttgaaatcctcattaaagatactctcggtcacgagaagagaatgccttctagatgca

SEQ ID NO: 882875 - DNA, 98 bp, Homo sapiens
ggctgcgcgggacggctctgtaggaaggaacttggttccccctccctcagcttccgccccaaaagatggtcctggtgctgcccaggaacccacgtggc

SEQ ID NO: 882876 - DNA, 98 bp, Homo sapiens
tgaggagacctctgcccagggattccgccagctgctggagctgaacctactggggacgtacaccttgaccaagcggcagtctttcccccctgtgtgca

SEQ ID NO: 882877 - DNA, 99 bp, Homo sapiens
aagcagatttcttttggatagtgatgggaaaagtgtaccatagagagcattttcccgggatttgcaagccaacatatgttaatgaggtcactgaacaca

SEQ ID NO: 882878 - DNA, 98 bp, Homo sapiens
ttcacggaggcaatagctagccgccccagcatgagaccagatgtaagctctcctccatccagctcctcaacagcaacaacaggaccacctcccaaact

SEQ ID NO: 882879 - DNA, 76 bp, Homo sapiens
gagtgctcttctactttgatgagctggaaaacctcatgctggacaaagatggccacatcaagatcactgactttgg

SEQ ID NO: 882880 - DNA, 99 bp, Homo sapiens
gctgctaggagccggtcagagggtttgtggaatcttgcttcccttttttccaacctttgtttatttgtattgatgccctttgcctttttctttctggaa

SEQ ID NO: 882881 - DNA, 99 bp, Homo sapiens
tgggctccggcccctggaggagctgagcattccaggggcctccttccagggggctgccctctcgaagatcaatgtccgagttaccaccatggatgcaga

SEQ ID NO: 882882 - DNA, 98 bp, Homo sapiens
aggaagaaggcattgtgggtgtcctggttctccatcattgtcaccctggccctcgcggtggctgcctttagttcaatgttggatatcataaaatacat

SEQ ID NO: 882883 - DNA, 99 bp, Homo sapiens
agacaacaggactgctggaaggccaggcaaagaaaacatcaatgatgagcctgtggatatgagtgctagacggaggttcaagaagacgtggaagctgcg

SEQ ID NO: 882884 - DNA, 99 bp, Homo sapiens
ccttgttatcagtgatggctcttctctggaagatcttgtggtggacagcgccatgtccctgatccaggcagccaagaacttgatgaatgctgtggtgca

SEQ ID NO: 882885 - DNA, 98 bp, Homo sapiens
gccattatcccacctccacaaagtaccaaaccaggaagaggcagaaggactgctaagacatgtggtcctctgtgggcacagcaatgtgggaatcagta

SEQ ID NO: 882886 - DNA, 98 bp, Homo sapiens
aatatggcaattgacctcacctcaagcacacccaatggacagcatgcctcaccaagtcacatgacaagcagtaaagtcagtgataaatcttttgtttg

SEQ ID NO: 882887 - DNA, 98 bp, Homo sapiens
accaactgctttcctttccctcagcacacagaggatgatgctgactttgatgaaggtacaaatgaatgtgctggcattcaacagacagttccactacg

SEQ ID NO: 882888 - DNA, 99 bp, Homo sapiens
gaaatggcacctatggacaagtctataaggctgaggccgcggaaggagcagggcacatacgccctgtccctcatctatgggaagacggtgtaccactac

SEQ ID NO: 882889 - DNA, 98 bp, Homo sapiens
tagctagaggggagatagcaagattctggagtctggaaagccttcacttgggtgtgacttttgttccaataatgaagagtcctttatcctggatgctg

SEQ ID NO: 882890 - DNA, 99 bp, Homo sapiens
tctttctccgcggcgaaggtgaagagttgtcccagctcggcccgcgggggagccccgggagccgcacgggggcagctggcattttatgctatgtgggag

SEQ ID NO: 882891 - DNA, 98 bp, Homo sapiens
agatatcaagtcatattatacagtgcgacagctagaattggaaaaccttacagtggccctggtacagtggacggaaagtgtgggcttaaccctggtgg

SEQ ID NO: 882892 - DNA, 99 bp, Homo sapiens
aagcactttgccatcacagtctgtgacggtctggacatcagccccgagagggctcatggatttgagatcttatgctccaaatgtagcccacatttttct

SEQ ID NO: 882893 - DNA, 99 bp, Homo sapiens
aggggatgaggggagcatgggtgccaaggagtcacggatcggattcctcagctacgaggaggcgctgaggagagagaaccatggagtctggcagtaccg

SEQ ID NO: 882894 - DNA, 99 bp, Homo sapiens
cctgatctcggacttcacagccagcagaactgattggtccaaaggaagattttttccattgtttgaaatgtaacttatgcctagctatgaatcttcaag

SEQ ID NO: 882895 - DNA, 99 bp, Homo sapiens
tgcaacctcaggcttcagccagaattggtccagatggtcatatcgctttcaatgagcctggatccagtttagtgtcaaggacaagattaaagactctag

SEQ ID NO: 882896 - DNA, 99 bp, Homo sapiens
caataaaagagacctctacttagctcagcaattcttaccttgaaagcgtctctagcagctgatatccccagacttggatatagttcctcatcccatcac

SEQ ID NO: 882897 - DNA, 99 bp, Homo sapiens
ttgatctcatagacaagtttgtacatccaaaatgctctacccatggtaccccaggaccagaaggcaaccatatttcagatttaccacttctagacagtc

SEQ ID NO: 882898 - DNA, 99 bp, Homo sapiens
taaccagaaaacatcggatttacattttaagattgccaacactcctgatagctgaatgtgtgctggtttacatgactccagagcagtccgcaaacctcc

SEQ ID NO: 882899 - DNA, 99 bp, Homo sapiens
gaacctgagccttcagtcaagaccctccagcttgcctgttgattcttcaccacactgaaaccattaggaaaaatccttgtggttaacagcagaggcttc

SEQ ID NO: 882900 - DNA, 99 bp, Homo sapiens
ggcgatgcactaggcctcgctcagggcggctgccccgggacccgcagaagaacttctgcttgggtggctgaactctgatcttgacctagagtcatggcc

SEQ ID NO: 882901 - DNA, 98 bp, Homo sapiens
gaaaatccacctcgcagcttgtaaatctacaggtcacagccaggggctttgggccgctgttacagtttgcctacactgccaagctgttactcagcaga

SEQ ID NO: 882902 - DNA, 98 bp, Homo sapiens
agcaacagagctgggtccgggtgtacggttggacgtgataagtatgagcctgcagctgtttcagaacaaggtgataaaaagggcaaaaagggcaaaaa

SEQ ID NO: 882903 - DNA, 98 bp, Homo sapiens
acacggcagagcatggccaagtccagatatatggagctctacacgtatcctcctgcctagcgcagatatgtgtcacaaagatgtctacacggaactgc

SEQ ID NO: 882904 - DNA, 98 bp, Homo sapiens
aggaagtgcctatccaccgtgttgcagatatatctgggtctgactgacagtactccacaagcttgcctgccatgggctgtcgggatgtccacgcagcc

SEQ ID NO: 882905 - DNA, 99 bp, Homo sapiens
gaagatctggcttcctttcactggagtttacttggtccagaacatccactagcctcactaaagtttaaggaagaaatctctaaacgttttaaatcacat

SEQ ID NO: 882906 - DNA, 98 bp, Homo sapiens
agtaacaacagcgaggaagaagaggacgacgacgacgaggaagaggaggtttctgaggttggacaccgaggaacagtaagagattatccagactttag

SEQ ID NO: 882907 - DNA, 99 bp, Homo sapiens
aacagtgttgtgccagcctacaggaggaaaggccagactcacagaagcattttctgcattagcaaatatcgacctggctttagaacaaggagatgcact

SEQ ID NO: 882908 - DNA, 98 bp, Homo sapiens
cggaactcaaaacagacccatctttggatcttcattcattaagcagtgcagaaacacaggtttaggaatgtatgaaacacccctgttcctagctcatg

SEQ ID NO: 882909 - DNA, 99 bp, Homo sapiens
acccatccatcctgcccaggcacagaggagcctctgctatcaattgccgtgttgaaatccttgtctcctgtagacccagtggaacccataagtaattca

SEQ ID NO: 882910 - DNA, 99 bp, Homo sapiens
ttcacttccctcggtctgggcttctctgaggcggcgagagatggtcaggtctggagctcgaccgggccaggtttaactgaactgaatgacagtccagtt

SEQ ID NO: 882911 - DNA, 99 bp, Homo sapiens
tggggcctccgcgccgcggccgttagtcatgtcgggtaaatcgatttagtaaggtggaagacagagcaatttttgtcactgaccgtcacctgtataaaa

SEQ ID NO: 882912 - DNA, 74 bp, Homo sapiens
ctcagacttctcgctggcctgggattcctccgtgacagcagcagaactgccattggatgtccagaatcccctgt

SEQ ID NO: 882913 - DNA, 99 bp, Homo sapiens
aagtccatgtgctggcagcacttccctgagccactctccaggctgctccagtactcaagggaacggccctattgctcactacaccttcacctgaaggtc

SEQ ID NO: 882914 - DNA, 99 bp, Homo sapiens
cctgtgtgagcagtctctggacaagatgaccacactccaggaatgccagtgcatcttttgcacagctatcaatgtccgagttaccaccatggatgcaga

SEQ ID NO: 882915 - DNA, 99 bp, Homo sapiens
ctatggaaactggtaattctgctgccactcataaactcttctgcagctgctgaaatgggttgcggattgaacaagttagagaaacgtgatgaaaaacgg

SEQ ID NO: 882916 - DNA, 98 bp, Homo sapiens
aaattgaagaactcagatcaaaacctgttactgaaggaactggtgatattattaagatccatatcatagattttgacgatgaaaacaacattataaat

SEQ ID NO: 882917 - DNA, 98 bp, Homo sapiens
gagtctctgtccgggggcctggctaaggaaaccctattacctccaggagatctgcgctgacccccagtttatcattggaggagccacccgcacagaca

SEQ ID NO: 882918 - DNA, 99 bp, Homo sapiens
tgaaaatcttcgcctgaagcagcaaagtgaattgcagagtcagatatggagttaccagtaaggagctccaccgtgactctcctccctgctccgttgccc

SEQ ID NO: 882919 - DNA, 98 bp, Homo sapiens
tttggtgatattttgatctgccgtgatcaatatcaggaaaggccccatcttcccttcacacctgttaagtgggcagaccaacatccacctcagcaaaa

SEQ ID NO: 882920 - DNA, 99 bp, Homo sapiens
acaagtggagctccttttcctccacctaccttcccgatagaacttcatggaggaacacggagtgacccaaaccgaacatatggctaccatagaagcaca

SEQ ID NO: 882921 - DNA, 98 bp, Homo sapiens
ctgaatctcctttgctatttgtgcgtggtggctggtcaccaggaggtggccaccaggctcctccattcccccctgaggacaagaattttgggcagatt

SEQ ID NO: 882922 - DNA, 99 bp, Homo sapiens
cggagatcagctgatgccagtcagagaagtttggcatataatcgaatagttgatgccctaaatgaattcagataagaatgtgccttttgatgaaagaac

SEQ ID NO: 882923 - DNA, 98 bp, Homo sapiens
aggcctggaagaaattgacagagctttgggcattcctgaacttgtcaatcagggagactgccagactcgggaggaggcagtggcgctcggcgtgggtc

SEQ ID NO: 882924 - DNA, 99 bp, Homo sapiens
aacagctctggaaaatgacagccttcatttctctgaacatactgccttatgggacagatcaatgaatgaactcattcttaaacagaagcaaagatttga

SEQ ID NO: 882925 - DNA, 99 bp, Homo sapiens
tatggaatcactgagatccaagactgaccacatccctgctcatctcacctatgggaagctgctagctctaacaagaccagatgaagaagctgtggtgga

SEQ ID NO: 882926 - DNA, 98 bp, Homo sapiens
agaaaccgccccagcgatggaagaggatcaggagctggagagaaccagctcctggccgaccatggacataatcctctcatgaaaaaagtttttgatgt

SEQ ID NO: 882927 - DNA, 99 bp, Homo sapiens
gactttgtaaaaatacagaaggcctttgaggtcacagtaatgaaaggcagtaatagaaataaggatcattcagcagaaggagaaggggttggaaaacga

SEQ ID NO: 882928 - DNA, 99 bp, Homo sapiens
tcatctctgaagctcgtgaaagaaaataacatccgatcagttgtgctgtgattctcttgggaagaaccaatatgtttcgctttaaccatccaaaggaag

SEQ ID NO: 882929 - DNA, 98 bp, Homo sapiens
agccagaaaaaaagtaaaagaaaactcagctgtgcgagtccttctggaagagcaagctgcagaaccttggcctgaaaatgctacattatatcagcaat

SEQ ID NO: 882930 - DNA, 98 bp, Homo sapiens
gatgaagcagctgcagccgcagccgcctccgaagatgggggatttctacgacccggagcacccgacccctgaacttgttgagcccattaaagaaatgg

SEQ ID NO: 882931 - DNA, 98 bp, Homo sapiens
cctgcctctggtcggttcctggcgctctgcgcttgccgggattgctgtccttgccattggactatggctccgattcgactctcagaccaagagcatct

SEQ ID NO: 882932 - DNA, 99 bp, Homo sapiens
ctatgagacttcatctgtgtggggctttgttatgcacctaaagccatattggaagctccagaagaaagagcaccccccggaagtcagcagggaaacgca

SEQ ID NO: 882933 - DNA, 98 bp, Homo sapiens
acacaaccttcttggaatctgactgtgatgaacagttgtttttaagggaaatgaatagaaacaatccactttgaagaagccatggcgaaatcaaagac

SEQ ID NO: 882934 - DNA, 99 bp, Homo sapiens
tagagttggccctaacgcagaacccaggttccgagatgagtcttttctgggagaagaggctacaaggacttagtgcatcagatgtaacagaacaaatta

SEQ ID NO: 882935 - DNA, 98 bp, Homo sapiens
cggatgctcagggttctggggatgctacagttcatcaggtgggcaatgggcactccaatgaggcagccttgatcctccacagaaaagggtttgattgt

SEQ ID NO: 882936 - DNA, 99 bp, Homo sapiens
caatgacatcttcacaaacgaggatagaagacaaggtgcggtggtcctccatgtgctctgtgtcttgaatataatcatggccaaaccttatgaatttaa

SEQ ID NO: 882937 - DNA, 98 bp, Homo sapiens
agctgttgaaaaatgcggttaaaaaggtgatgggtatctttaagagcagcttattccaagctttgctaggtggatgaaaatactaggaaaagtttatt

SEQ ID NO: 882938 - DNA, 98 bp, Homo sapiens
tccgctgtcgcccccgcagcaccgctactcggagggcgagcggacctccctggagaagagtggcaaaaatagtagctcccaaaaagataaaactggct

SEQ ID NO: 882939 - DNA, 99 bp, Homo sapiens
tgagcagccaacacaccagcccagacagctgcaagtcaccatggacgctgaaggttatcaatactctggctgaccatcatcatcgtgggactgactttg

SEQ ID NO: 882940 - DNA, 99 bp, Homo sapiens
ttaggtcgtgtttccaaagagaaaaacctactcttgatacacaatctaaaaagaattaggaaggtccttcaggatgagacttcagcactcaagtttgaa

SEQ ID NO: 882941 - DNA, 99 bp, Homo sapiens
accatttattgagtttctgaaggccatacaagatggaacaatagttttaatgggaacatacgatgatggagcaaccaaattggactccttcttgtcctg

SEQ ID NO: 882942 - DNA, 98 bp, Homo sapiens
cgccccgaaactttcaccgcgagcgggtattctgagagaagcctcacaaagtgtattggaattactattgaaaccagaccagattactgcatgaagcg

SEQ ID NO: 882943 - DNA, 98 bp, Homo sapiens
tccgttcccccctcctcccccctcccctcagcggtggctcccaagaagtccgagacacgcggggttgcagatggtgtaggaggctggagagactatgg

SEQ ID NO: 882944 - DNA, 99 bp, Homo sapiens
aggacatgatccaggaagagcagtaagggactgagctgctgggaatgcagagagcaaccaatgtcacctaccaagcccatcatgtcagcaggaacaaga

SEQ ID NO: 882945 - DNA, 98 bp, Homo sapiens
ctcatcccaatggacactgattcagatgaagaggaagatgatgatgtagtggctcctaaaccacctattgaacctgaagaagagaaaactttaaagaa

SEQ ID NO: 882946 - DNA, 99 bp, Homo sapiens
aaactggtacaaaacaacgtgttattgatcttcgctgtaacccaagaacaagttcatttatatgagatattaaggctaagacatactgcatttgtaata

SEQ ID NO: 882947 - DNA, 98 bp, Homo sapiens
gaaaccccgttgacaaggcactgctttttcatgacggggcagaggcctggcctccaggggtttgtcttaaatatgtcgggggagaccaatttggacat

SEQ ID NO: 882948 - DNA, 99 bp, Homo sapiens
tgggttggaagaaaggagagggcctggggaaggatggtggaggaatgaaaacgccgcctaccgtatgtgaacgggagctgtgtgtgtttgcttttcaaa

SEQ ID NO: 882949 - DNA, 99 bp, Homo sapiens
cacagatggggaggacagtctagagagaaagttactccacaggatccgctgaacataggatgttgccacaaaatctacctcgtgtatttttctctttca

SEQ ID NO: 882950 - DNA, 99 bp, Homo sapiens
catgttcgaggactctgtgaatctgtggtggaagcagacctcgtggaagcgctggaaaaatttgggacaatatgggccatgctatgatagtggaagctt

SEQ ID NO: 882951 - DNA, 98 bp, Homo sapiens
ttctttggaaatctctacatatattttgcctggcaagggaaaactcagatatcagccgtggtccttcagcatatctctgtgctgcagacaacacacct

SEQ ID NO: 882952 - DNA, 99 bp, Homo sapiens
cgcgggagccgctgcccgaactcccggcccgaactccagggacacttggcattcagggacgtggccatagaattccctcaggaggagtggaaatgtctg

SEQ ID NO: 882953 - DNA, 99 bp, Homo sapiens
gaaacagaagcttactttgctgacctgataatgaagaattattttgcaccactggatgttgtttactggttgaaaattggtgtcctcatttaccttgga

SEQ ID NO: 882954 - DNA, 98 bp, Homo sapiens
gggcactgtgctcctgttctggcttgtgctttttcccatgatgggcagatgctagtctcaggcattcctctgaatattgatttgctgaatagcccaga

SEQ ID NO: 882955 - DNA, 75 bp, Homo sapiens
tctatttaaatttagtagtcgatatccttttgactctcctcagttcaactttgtggggaaacttttgggtccacg

SEQ ID NO: 882956 - DNA, 99 bp, Homo sapiens
ggagattctccggggacccttccgtatctgcctaggcattttgctgtctcctcctaatacgaagttaccccccaagcgtccagaactccctccaactct

SEQ ID NO: 882957 - DNA, 75 bp, Homo sapiens
gccatgaccactgtggagaacaaatccaagattagcacaggttttcctttggaatatggataaatacaccatgat

SEQ ID NO: 882958 - DNA, 99 bp, Homo sapiens
agaagatggcatgcctggaggccggaataagagcattgggccagtccagaataatcatgggccagactgggaagaaatctgagaagggaccagtttgtt

SEQ ID NO: 882959 - DNA, 99 bp, Homo sapiens
agaacagatgaacaaggccttattgttgaagacctagtagaagaggtgtgtcccagaagcttttgttgacaattccagtttccgaacaaaacatttcgg

SEQ ID NO: 882960 - DNA, 99 bp, Homo sapiens
aaactgaggcctggaatttgattaactcattcaaggttacccagttgacttaattcagtgcacaaatgagatgaatgtgaacatcccacagttggcaga

SEQ ID NO: 882961 - DNA, 99 bp, Homo sapiens
gtcacctttgaaagcccagcagacgctaaggatgcagccagagacatgaatggaaaggtttctctggaaacccccctggtaagtgtggaggaggcggga

SEQ ID NO: 882962 - DNA, 99 bp, Homo sapiens
cacgagcgggtgacgctgggcctgcagcgcggagcagaaagcagaacccgcaggtatatgtctcgagtccacggtatgcaccctaaagagaccacccgt

SEQ ID NO: 882963 - DNA, 98 bp, Homo sapiens
ttcagcgctcgggtgaggagctggtggcgtcggcaggttcgaggcgattcgaggaaagaccacagcaagattctttcattcgtctcctcctagcctgg

SEQ ID NO: 882964 - DNA, 99 bp, Homo sapiens
ctacgcagaagtctccctcaggatcagaccgtagcccttccggaaacctccatgggggggccctcagcctcttggccttgaacgggctgttcatcttga

SEQ ID NO: 882965 - DNA, 99 bp, Homo sapiens
gctcttgaaagtctggttaataacgagttctctagcgctagtgatgtggatcgaatcatcaatttagttgttggcagcttaacatccttattgattcta

SEQ ID NO: 882966 - DNA, 99 bp, Homo sapiens
cccacccccaaatgttgactatccattagatggagagaagattttacatatccttggatcaatcagatgttcggttactgcttaataatgacaatcttc

SEQ ID NO: 882967 - DNA, 99 bp, Homo sapiens
tccagggttctttggggcccgaggttttgaacgaagaatgtgatcagaactggtacaaggcagagcttaatggaaaagacggcttcattcccaagaact

SEQ ID NO: 882968 - DNA, 99 bp, Homo sapiens
cactcgtggtatgagagtggataatataatcaactcctctgcctggagccctctggcacaaatggaagaagaaagaagggagcaagtagctaaaattaa

SEQ ID NO: 882969 - DNA, 98 bp, Homo sapiens
agttgtccatgaccctgaaggtccaggagtacccgaccctcaagtgcactggtgattgctgcggtgtttgaccgagacataaactgcagaagagcagc

SEQ ID NO: 882970 - DNA, 99 bp, Homo sapiens
gggcaaagagtaccgtgagaagatagaggcagaactgcaggacatctgcaatgatgttctggaaaccactgattgcttgtgtggagaaacagctattag

SEQ ID NO: 882971 - DNA, 99 bp, Homo sapiens
gcagttcccgggccagcctggggcggccggccaggaaccacccgttaaggtagctaaaattggtgctttctgctgtggccttagtttatgtaaccagca

SEQ ID NO: 882972 - DNA, 99 bp, Homo sapiens
accaagcctctcattgttcatggaaccttcatcgagttccggaatggcatgctgaacatctcgcccatcggccggagctgcaccctggaggagaggatc

SEQ ID NO: 882973 - DNA, 99 bp, Homo sapiens
gaacatcacagtacattggtatctacaagacattatagagcacctgaagttattttagaggagaaggcagagcccccccaggctatgaatgccctgatg

SEQ ID NO: 882974 - DNA, 99 bp, Homo sapiens
atacttggcaaaactttggaaactctcacagggcccagtctatggcatgaataggcttccaccccaacagcatatttatgcctatccgcaacagatgca

SEQ ID NO: 882975 - DNA, 99 bp, Homo sapiens
tcggcttccagctcaatcctgccggttgcgccttcttcctggacatgaccaactgctgtcaccactgactaaagaagagaaaactgcggcagagcaatt

SEQ ID NO: 882976 - DNA, 99 bp, Homo sapiens
ccagcatggaaccaaagcggatcagagagggctaccttgtgaagaagactggtcgaattgacaaatcttaccctacagtatgtggccacacaggaccag

SEQ ID NO: 882977 - DNA, 98 bp, Homo sapiens
ggaggaggtgctgacggactcacctttggcaaagggactcatctaatcatccagccctctcatgatggagcagtccaagaagtcctccctcatggtgg

SEQ ID NO: 882978 - DNA, 99 bp, Homo sapiens
cactcaccttccacctcctccatttcttccacctcctccgactgtcagcactgctccacctctgattccaccaccgggctaggaattatctgtgaatgt

SEQ ID NO: 882979 - DNA, 98 bp, Homo sapiens
gtccccaagccgttctagacgcggatgttggatgacaataaccatcttattcagtgtataatggactctcagaataaaggaaagacctcagagtgttc

SEQ ID NO: 882980 - DNA, 99 bp, Homo sapiens
acagaactagaagagtggctaaggcaggaaatggagattgagaggatccagaatccagatctctggaatagctaccaggcaaagaaaaaaactatggat

SEQ ID NO: 882981 - DNA, 99 bp, Homo sapiens
taaggagtgcaccatccaggagaaggacggtcttactctgttacccaggctggagtgcagtagtaccatcgtggctcactgcagccttgacttccctgg

SEQ ID NO: 882982 - DNA, 99 bp, Homo sapiens
ggaggttggggtcatggcgccccgaagcctcctcctgctgctctcaggggccctggccctgaccgatacttgggcggaggggcgcccaggaggcagtga

SEQ ID NO: 882983 - DNA, 98 bp, Homo sapiens
ctcaaacagcagtatgatgaactggaggctgagtacgacagcctcaaacaggagctggagcagctcaaagaggttggactccatgaaagaattgcaca

SEQ ID NO: 882984 - DNA, 98 bp, Homo sapiens
cgggacagagcgcctgcgaccccagtcggtgctccggggaggtcacctgacgaggagatatggaatgtgcagatgtcccactattaactccaagcagc

SEQ ID NO: 882985 - DNA, 99 bp, Homo sapiens
ctgagccgtcttgaggacccgctgctgtggcgcacaggcctgacggatgacacccacacagaccctgtgtcccagacctagtgaaatggaagatgtcac

SEQ ID NO: 882986 - DNA, 98 bp, Homo sapiens
tgcgttttaaggcgaagtcatgatgtattctcccatctgtctcactcagggctgttttgctgcagcttctgaagtgttaaagcacttgaaggaacgat

SEQ ID NO: 882987 - DNA, 99 bp, Homo sapiens
aatggaatctggtccaaacaatcatgggaatttccaaggggattcaaacttcaacagaatgtggcaaccaggcctggagctgctgaagactgctattgg

SEQ ID NO: 882988 - DNA, 98 bp, Homo sapiens
tgatgagtgtcctttacaaatcttcagggaatggccaagtgacaaagcggagtttaagagagctgtgaaagtagcaacaggacaagaactctcaaaca

SEQ ID NO: 882989 - DNA, 98 bp, Homo sapiens
agaaagcaaagcgcagaaatgttggatttgaagtgatgacacatctccacgtgattgaagaaaggaggaaccaaagcctctctctgctctacaaagta

SEQ ID NO: 882990 - DNA, 99 bp, Homo sapiens
gatatggagccttatgtggaacataaagagtactgggatttaatgaatttgtctgaaaaacatgataagataccagaaatctgggaaggccataatata

SEQ ID NO: 882991 - DNA, 99 bp, Homo sapiens
atggagtcttccatcaatcatatctcacaggaaacctcgacctgtctcccagttggttgcacagcaggttactcagcagtttgtgcctcctacacagtc

SEQ ID NO: 882992 - DNA, 99 bp, Homo sapiens
cgggctgggctgcggggtcaggggccgagcggagaggggtattagaaaactactcggatgctccaatgacaccaaaacagattctgcaggtcatagagg

SEQ ID NO: 882993 - DNA, 99 bp, Homo sapiens
gacttggatacagaaatttcctgggctaaaatggagtgaaggtacctgagcgcaggaaccatggtcttcattgctgcctcagcattagcggaagtgcca

SEQ ID NO: 882994 - DNA, 99 bp, Homo sapiens
agcagctgtgggagccccgagaacgcctccagcggggatgacacagaagatgtctaatacaggaaattggatgcatattcgttatcaatctaaactgca

SEQ ID NO: 882995 - DNA, 99 bp, Homo sapiens
gatgttgggatgagagtcggagccgaataccaagctcggatccctgaatttgatccagtgttctaagaacggaagcatctgggctggatggaatttagc

SEQ ID NO: 882996 - DNA, 99 bp, Homo sapiens
tccacgacctatcctaggcgccatgcgataagacactcaacgagaaatgacagaaaaacaaggtgtggatggagaggcaacatgaaagtggatcaaaca

SEQ ID NO: 882997 - DNA, 99 bp, Homo sapiens
caagccgaaaggaagccacgtgaggacagttatgggatggatgggaaggttaatcagccccgtctcactgcagacatcaactggcaaggcctagaggag

SEQ ID NO: 882998 - DNA, 99 bp, Homo sapiens
ataaaaataccagtagtgtgtgctttaactcaagaagaatcttcagcccagttatcaaatgaagaggtgagtaatagctctggagagacccttggagct

SEQ ID NO: 882999 - DNA, 99 bp, Homo sapiens
aaaaacacaaaaaaggacctatggagactggattgtttcctggtagcaatgccactttcaggatactagaggaagacagtgacccgcccattcatgaaa

SEQ ID NO: 883000 - DNA, 99 bp, Homo sapiens
ctagaccggtttttagtccattgactatgcagcctaatggttaaatggaagctgatcggcgttcacatggaatcctcctcacgtagctcagatggatgg

SEQ ID NO: 883001 - DNA, 98 bp, Homo sapiens
acatttgtcatgatgacagtgacaaggacactggggttgggaaatcaagcatcgtgtgtcgatttgtccaggatcactttgaccacaacatcagccct

SEQ ID NO: 883002 - DNA, 98 bp, Homo sapiens
ccttcacaatccaagttccacaatatattgactactgccacaattccgtctgatgccaatgcaagttacttaagagcagctcgagctggacaccttga

SEQ ID NO: 883003 - DNA, 99 bp, Homo sapiens
gtgcccagggagaaccccttggatatcgccaggatggtggatatggttatagaagaagtggccgagataaatatggccctcctactcgcacagagtaca

SEQ ID NO: 883004 - DNA, 99 bp, Homo sapiens
tggcggacgcaggagcgatggcagcgaccgatatagctcgccaggtgaattcacagatggattcagtggaaaagacaacaaatagaagtgaacaaaaat

SEQ ID NO: 883005 - DNA, 99 bp, Homo sapiens
attttgagccatacttaagtagccagacaaatcagcttgagtgtgcgtcagaatcccctgaagagcttgttaaaacacaaggtgctggccccatccaga

SEQ ID NO: 883006 - DNA, 98 bp, Homo sapiens
agagccaggtgaactggaggagcgatttgccatcgtgctgggcaactccaacaacattgccaccgtggacatctccgcaggcttcgtgggcttagaca

SEQ ID NO: 883007 - DNA, 99 bp, Homo sapiens
tcaggctggaacttgccctgtctcctcgcagatgagaagtgtgtatctcatgtccaagtggatagcagagaacttgatcgaagaaaaacattgcaagtt

SEQ ID NO: 883008 - DNA, 99 bp, Homo sapiens
gatcgctttggaaacatctttaccctgttcattgggccagaggtgatgatgaacagtctacacagatggctgcaagttgggaagatgataaagttacag

SEQ ID NO: 883009 - DNA, 99 bp, Homo sapiens
gccaggatcctgcaccgggtggtggctgggggagactcatgcatctgtatgccgtgtgcgtggactgcctggaaggggttcacaagatcatctgcatca

SEQ ID NO: 883010 - DNA, 99 bp, Homo sapiens
acaaatttgctgacttcatggtgaaagacgtaaaaaatggagaatgttttcgtgctgaccatctattaaaagtttccatcttttatccacagccaaaag

SEQ ID NO: 883011 - DNA, 99 bp, Homo sapiens
cgatcccgccggaagcgccaggacaatggggacccgggacgacgagtacgactacctattcaaaggtctgccatcatggatgttctcgcagaagcaaat

SEQ ID NO: 883012 - DNA, 99 bp, Homo sapiens
gaagaaaagcgcaaactgctgaagtttgtaacaagctgctctcgaccccctctcttggggtttaagggtctccctctgtcgcccagtctggagtgcagt

SEQ ID NO: 883013 - DNA, 98 bp, Homo sapiens
ttaaaagaaaacaaggcgattccgcagtccccccgttccctggaggtcctgtggaatgtaggagagaagtttgctgaggaatgccttcaagcacaaag

SEQ ID NO: 883014 - DNA, 99 bp, Homo sapiens
tataccaagtcattctgtatgatgtcaggacacaagttccatgccattgcagtgtcaactaggcctcagttacttttcagtttgcccaaattgagccca

SEQ ID NO: 883015 - DNA, 98 bp, Homo sapiens
gaagctgcaattttgagttcactagaacgaacactgctatcattgaaaggtgcatgtgagggaaccctggcttgttcaacctgtcacctcatctttga

SEQ ID NO: 883016 - DNA, 99 bp, Homo sapiens
tgctggccacttgcttgggatcctttatcctggtcatcttctatttccaaagtcatgaatgaaaaacttcagcactgcatggaactaacagatctaatg

SEQ ID NO: 883017 - DNA, 100 bp, Homo sapiens
cgcgagcgaggcgccctagacatcttctccctcccttgcctcagctgagctgcccctcctggacctgatgaagctgtacgaaggcgccttcctgccgagt

SEQ ID NO: 883018 - DNA, 99 bp, Homo sapiens
ggaatatgccaaggaaaaactggagagcttcatcaaaaatagtgatagctttgataactgtcttttggggagacattgccttagatgaagatgacttga

SEQ ID NO: 883019 - DNA, 99 bp, Homo sapiens
ttcgagaaatgcatcattgaagccgtgagctcagcctgccagggtctgcaagtggatgatgagattgtggagttcggctctgtgaacacccagaacttc

SEQ ID NO: 883020 - DNA, 98 bp, Homo sapiens
agcaaaggtggctgctaatgcaccaaaggtcatctctgaatttgagcaatggtgaaacggaatctgtgaaaaccatgattgtccatgatgatgtagaa

SEQ ID NO: 883021 - DNA, 99 bp, Homo sapiens
aaattaaagaaattttacgaattttctcagaggttaggtttctaagcatgaattgaggaacagaagaagcagagcagatgatcggagcagcatttgttt

SEQ ID NO: 883022 - DNA, 98 bp, Homo sapiens
aataaaccaagcactctagatgccctcaactatgctctccgctgtgtccacagcgttcaaggtacaggtttgcagattccgccagcagcacagcaagc

SEQ ID NO: 883023 - DNA, 99 bp, Homo sapiens
ttggctttcattcatgaatgaggtgaatctggattgggaaagtcgacattaatcaactcattattcctcacagatttgtattctccagagtatccaggt

SEQ ID NO: 883024 - DNA, 99 bp, Homo sapiens
gcagacctttggggacaactaaagctgcgggatacaaagtcagcccaggcagacctccagtcaccaggagactaaagtccatcaaaaacatccagaaaa

SEQ ID NO: 883025 - DNA, 99 bp, Homo sapiens
accgcaggtcgaggacggtcggactcccgcggcgggaggagcctgttcccctgagatcttatgccttcattcatccggcatggtccaacaattccaaga

SEQ ID NO: 883026 - DNA, 99 bp, Homo sapiens
tctgtgggagaccggagcgggagacagcggtgacaggagcagcggccgggagcccttagggaggcagagattttattccctcaaagttgcccccaaagt

SEQ ID NO: 883027 - DNA, 99 bp, Homo sapiens
cgttccttgtctgcctcgctttctccttggccaccctggtccagcgaggcacgtgtggttctcaaatataggcattctgatgggaacttgtgtgttaaa

SEQ ID NO: 883028 - DNA, 99 bp, Homo sapiens
ttttaaaaaaagttgcagctactttgcaagtgccagtaaatgatttaaatgcaggatttaagaggggtgcagatcccggaatgcctgaaccaactgttt

SEQ ID NO: 883029 - DNA, 98 bp, Homo sapiens
gagagggggcgctgagctgttgggacctggaatggccaaatatcaaggtgaagttcaaagtttgaaactggatgatgattcagttatagaaggagtaa

SEQ ID NO: 883030 - DNA, 99 bp, Homo sapiens
gatgctgtgccttcctccgctgaaacagggggaacgaattatctggcccctggggggctttcaggattttttatcaagcagaaatgcatcgaacaacga

SEQ ID NO: 883031 - DNA, 99 bp, Homo sapiens
ctttgcacttttgattgtgtattatggataccaaggaagagaagaaggaacggaaacaaagttattttgctcgatgcctgtgaggagccaccaacattt

SEQ ID NO: 883032 - DNA, 98 bp, Homo sapiens
ccatttggttgcagcaaagaggaaatagttcagttctttcaagcactgccagtgaaagatgtagaagataaacctgaacaacaaaccagaacaagaga

SEQ ID NO: 883033 - DNA, 99 bp, Homo sapiens
ggccgaaccccgcgcccgcaggacgccccagccagagtgtgaacatggctacgcctcttcattcccgtccatgccgagcccccgactgcagcattcaaa

SEQ ID NO: 883034 - DNA, 98 bp, Homo sapiens
gcttttatattcatctcaaaaacaaaattctgaactcaggacttggcaagcaaaaagggcagctagctgtagaaagagctaaacaagtagaagagttc

SEQ ID NO: 883035 - DNA, 99 bp, Homo sapiens
gcttttttcattgttccactggacgctcatcagagggaagatctttttcctcaattggaagttctacagactttgaccaagttttgtttccccttctat

SEQ ID NO: 883036 - DNA, 99 bp, Homo sapiens
ggggacccttccgtatctgcctaggcattttgctgtctcctcctaatacgggaagtgttcgccagttactacatgaaaagataagagatgcttatactc

SEQ ID NO: 883037 - DNA, 99 bp, Homo sapiens
attaagaccatctgctatcgaaattttaaaaatcccttaccttgatgagcagctacagagagcccgagcccagcacattgtgccctgtactatatctca

SEQ ID NO: 883038 - DNA, 99 bp, Homo sapiens
gaggagcctggaccgctcattcggactcgtcgggcagcatcctggtggggaagaagttttaagggaacaagctggaggtgacgctactgagaactttga

SEQ ID NO: 883039 - DNA, 99 bp, Homo sapiens
cactacaagggtagcagtcgtggacgttctaagaggtggagcagctcctgtacgaaagccctgagcggtactcccgctcagtgcttctcatcacccagc

SEQ ID NO: 883040 - DNA, 99 bp, Homo sapiens
tgaagacaaaaatccagaagtacaagcagtctgttgcagatctgatctcttctgaacacctcatcgtgtctccatccctgggaatctgaccctagcaac

SEQ ID NO: 883041 - DNA, 99 bp, Homo sapiens
attctcatgcatttattgatctgactgaagattttacagcagtttcctattctgtgaaacagaagacattgtgatggagtggttcttcagctactggat

SEQ ID NO: 883042 - DNA, 99 bp, Homo sapiens
gggctcatccaaggatgagattttgccagagaaaggacgagcagcaagtcagggagcttaaggatgcctggtgtgcaggagtatatacaacagcctatt

SEQ ID NO: 883043 - DNA, 99 bp, Homo sapiens
cttactgaaggcagtgaagcgaagaaaaggatcccagaaagtttcagatggctctgagtaaatcaatgcatgcaagaaatagatacaaggacaaacctc

SEQ ID NO: 883044 - DNA, 98 bp, Homo sapiens
aaatcttaaccttcaaccatctggggaaaaggcaaaaatcccatctaccgcaactctcagttcgagagtaaagcttcttccagaccagctggtcttgc

SEQ ID NO: 883045 - DNA, 99 bp, Homo sapiens
tcgattagctaataaccaactgcaattcctacctccaggaaagttatatcacagatgatattggaatatcgacttggaaggagcagacttttctctccc

SEQ ID NO: 883046 - DNA, 98 bp, Homo sapiens
tgatacctgggggagataatgtaactgtgtgcaaggataacagtcactcagcctctgaagaagcttcgggttcagactcaggcagtcagtcggaaagt

SEQ ID NO: 883047 - DNA, 99 bp, Homo sapiens
agctcactgccgacttcagggaggatccggacccccgcaaggtcaacctgggagtgggagacttaattcagtgcacaaatgagatgaatgtgaacatcc

SEQ ID NO: 883048 - DNA, 99 bp, Homo sapiens
agaatatgccaagtatctaaagagaaactcccatgtatggaatcccactgtatgatttataaacagacaatatgtgagtgccttttgcagaagagggtg

SEQ ID NO: 883049 - DNA, 99 bp, Homo sapiens
acaacagcaacttgtgattggcggtgaccggatattcagttgcacatccccacatcaatgcactgccaatgcatgattccacctttccactgatagact

SEQ ID NO: 883050 - DNA, 98 bp, Homo sapiens
acagttgccatccacagtgatgttgatgctagttctgttgaagccatccttgtcaatatatttggtggtatcgtcaactgtgccatcattgccaatgg

SEQ ID NO: 883051 - DNA, 99 bp, Homo sapiens
agccggtctatggactttccgaagacgaggtgaaaggtgtagcagtcactcggcctacacccacagcatcgaccttgtgaacccagcgacctgactgcc

SEQ ID NO: 883052 - DNA, 98 bp, Homo sapiens
gaccgccgccgccgccgccaccatggggagttgctgagtcagcccagaccggaaggagtggcagagatcatttgccccaagaacggcagcgagcgagt

SEQ ID NO: 883053 - DNA, 99 bp, Homo sapiens
tcttccaacaccagtggaagatgatcacatcccaggtgaccgggctggtccacaagtgggcatggaccaaagacgacgtgatcctccacgtgctcccgc

SEQ ID NO: 883054 - DNA, 99 bp, Homo sapiens
gtattaggagaatcttttgagacttctgctccttgggacagttgccaaaacaaaggggatttggtgatggaggctttgttagaaggaatacaaaatcga

SEQ ID NO: 883055 - DNA, 99 bp, Homo sapiens
tgaagacaaaaatccagaagtacaagcagtctggtggatccataaagaacccagccaacccgcagagggaggggaggggctgagctgtgaggagagcgg

SEQ ID NO: 883056 - DNA, 98 bp, Homo sapiens
tgggagcgagcggaggagcaggcgccggagatacaacagagtggaccaccctagtatcagattctcaggaagataaaaaaaattcaagaccaagacca

SEQ ID NO: 883057 - DNA, 98 bp, Homo sapiens
gaagatcaagctcgcgactctccaagagggaggtgtccagtctgctaagctacacacagggaaatgatcttcattggttagcatgtgccttatatgtg

SEQ ID NO: 883058 - DNA, 98 bp, Homo sapiens
gcagccgtccggagccagccaacgagcggttcttgggtgtctctggggagtccctgggccagaccttcctccagactccagcccacctcttcggagca

SEQ ID NO: 883059 - DNA, 99 bp, Homo sapiens
ccaggaccagcgcctggagcgggatgaatttcacccattcatcgaggcacttcttccacatgtccgtgcaattgcctatacttggttcaacctgcaggc

SEQ ID NO: 883060 - DNA, 99 bp, Homo sapiens
ctacaatggagtcgagtctagaattcacacagagccacctagcagcagtgttgtactgctacttctataaacggacagccgtaagactaggcgatcctc

SEQ ID NO: 883061 - DNA, 98 bp, Homo sapiens
ggatgtgatgcctgctagccaaaagggtgctgactgggttacttttttaaacactaggaatggtaatttctactcttctggacttcaaactaagaagt

SEQ ID NO: 883062 - DNA, 99 bp, Homo sapiens
aaccagatatcttgaaaagctgccagaaaggagcacggtctgaatctgcacagagcaagatgctgagtggagtcgggggctttgtgctgggcctgctct

SEQ ID NO: 883063 - DNA, 98 bp, Homo sapiens
ggcaacctccagaggggcctcccggtgtcctcgggatatcgccaatgtgatgcagaggctgcaaggccctcgggaccaaggatcacgtcatgactccg

SEQ ID NO: 883064 - DNA, 98 bp, Homo sapiens
gattattgagcataagattgtcatagctgatgtcaagttggttgctgatttccaaagagggagacgtggtgggcggtccttcctgtgacacgaccctt

SEQ ID NO: 883065 - DNA, 98 bp, Homo sapiens
tgaccaacttgctgcggtttttgttcctggggctgagtgccctcgaacccagcgggtgccgcttctccacccgaggcttccacctccaacgagccatg

SEQ ID NO: 883066 - DNA, 99 bp, Homo sapiens
aggaatggcctcctcccttagctccctgttcttggataacgaaggaggcccaacttcattcaataaggagcctgacggatttatcccagacggtagaac

SEQ ID NO: 883067 - DNA, 76 bp, Homo sapiens
agagactgaagaggactcaggagcaaatcagtaatgaatctggaaaaccaggggctcatgtaactgtgaagaagct

SEQ ID NO: 883068 - DNA, 99 bp, Homo sapiens
actagcagatgctggcgacctatccagaatgatcaagagacgcccaagcagatggcctgcgatgaagtttagaagaggctctggacatcctgcctatgc

SEQ ID NO: 883069 - DNA, 99 bp, Homo sapiens
gaaggtgttgtgagaaaagtgaatcagaaaattggaagctgtacacagcaagacgttgagttacatgttcagaagaaaacctttccaacctatgagaga

SEQ ID NO: 883070 - DNA, 132 bp, Homo sapiens
cagattttagatgaaaagatctactgccctcctgaggcttctgtgctcctggcttcttacgccgtccaggccaagattgggaaaatgaggtacgttagtgttcgcgattttaaaggcaaagtgctaattgat

SEQ ID NO: 883071 - DNA, 99 bp, Homo sapiens
atatgtttttggactctaatttcacggacactgaaagcagagaccatggagcttcttgtacagctattggaatcagatgcaaagatggtgttgtctttg

SEQ ID NO: 883072 - DNA, 99 bp, Homo sapiens
ggcagacctggagcgccacgccatcttcacagagaaactaattctgaagcaagcccttatagttgtgctgcagtggtgtttcaatcacaattttagtgt

SEQ ID NO: 883073 - DNA, 99 bp, Homo sapiens
ggaggtgcagaaactggtggagagcggggtggatgtgaactcccaaaatgaggtcaacggctggctggagtacagtggctcgatttcagatcactgcaa

SEQ ID NO: 883074 - DNA, 99 bp, Homo sapiens
tgaggaacaacatctatgaagtcatggtcttggccatggacaatggttgttcctcaaagtcattcaagctgtactcgccgaaggagcccccgaacggca

SEQ ID NO: 883075 - DNA, 99 bp, Homo sapiens
gagtccgcgggaagatggcggcgccgctcatccccctctcccagcagaagctccaccatgaggcgaggtggatggaggaagcgagctgaaaatgatggc

SEQ ID NO: 883076 - DNA, 99 bp, Homo sapiens
tcaggagaaagaagacagccatcatttgaaagttgacgaaggatcagagattggtgtattcgggcagactgcttcccgatcatctgcagctgaaagaca

SEQ ID NO: 883077 - DNA, 99 bp, Homo sapiens
tccaccaccggcagcatcctgaatcttaacctggcttagaaatgttggacaaagttgagcctccaactatacctgaaggttacgccatgtctgtggcat

SEQ ID NO: 883078 - DNA, 99 bp, Homo sapiens
aatcatagtggaactaaggggaacttaatttactgacttaattcagtgcacaaatgagatgaatgtgaacatcccacagttggcagacagtttatttga

SEQ ID NO: 883079 - DNA, 76 bp, Homo sapiens
gttcgaatgggtgtggacacacctgtcaagtacccaagactctgtacaaagccaaaattgcctggaaaagagcagt

SEQ ID NO: 883080 - DNA, 99 bp, Homo sapiens
ctctgtacaagaacaggctcggctcaggtgcaagggagcagccaagagagagacagacacgatggatacctttgttgattctgcttggtactacttcag

SEQ ID NO: 883081 - DNA, 98 bp, Homo sapiens
tgagcgcccagcggacaccggcagcgcgcggtcgacgcgggcctgagctccctccaggaatgaatctgaagtctgctgcagtaaaacacagaaggctt

SEQ ID NO: 883082 - DNA, 98 bp, Homo sapiens
ttatggctgctgttgtccaacagaacgacctagtatttgaatttgctagtaacgtcatggaggatgaacgacagtttgttgcatattctaaggaccca

SEQ ID NO: 883083 - DNA, 76 bp, Homo sapiens
gccctggctgctccgggtcaacggcaaatcaggcaggaaatgctatgtggtcgtggcacgttttgttgggggtttc

SEQ ID NO: 883084 - DNA, 98 bp, Homo sapiens
accgctgtcaagctcaacactggggagtgtgtcatgaacaatgtcacctgtactcggatctatgaaaaagtagaataaaaattccatcatcactttgg

SEQ ID NO: 883085 - DNA, 99 bp, Homo sapiens
tacagtgtttgagaattacacggccagttttgaaatcgacacacaaagaatagagttgagcctgtgggacacttcggagctgtccgtggcacagtgcac

SEQ ID NO: 883086 - DNA, 98 bp, Homo sapiens
tccagagctgaggactgcctgtttgcagctgggatctagcaattgggaggcagcagacttgggtaatgaagagagaaaacaaaagttcttgagactta

SEQ ID NO: 883087 - DNA, 98 bp, Homo sapiens
ttccacgtctaggacagctgcgcttcttctttcagctgttcgttcaaggctatgccctgcaactgcaccagttacagaatctgaattatccagaacag

SEQ ID NO: 883088 - DNA, 98 bp, Homo sapiens
gtggagccgctgcggcccgacgagctggagcgcctgtcaggctgggaggaggaggaggagagctggtgtgaagatgccttaagaaaaaataagagctt

SEQ ID NO: 883089 - DNA, 98 bp, Homo sapiens
cttaatctgggccaaaaggaatgaccctagccagactcagggatcaaagagcaaacagattcagtggcctgcattggaaacatgccctgaactgtcac

SEQ ID NO: 883090 - DNA, 98 bp, Homo sapiens
cccgataccttacacgggaacctgtatgatgagacactttgagactccgaacaattctggaagcaatacagaagcacattcattcttcctccctcatc

SEQ ID NO: 883091 - DNA, 99 bp, Homo sapiens
gaacctgatttgagatcaattcttggagaacacaaagaagtgtgatgagatgtgctccggcatctattcgcctcatggacaacaagcagtttcagtttg

SEQ ID NO: 883092 - DNA, 99 bp, Homo sapiens
caagatggcggtgcaggagtcggcggctcagttgtccatgaccctgaaggtccaggagtacccgaccctcaagtccacaggtcctggctaccctgggaa

SEQ ID NO: 883093 - DNA, 98 bp, Homo sapiens
gcacaaccacagcaagagcacctggctgatcctgcaccacaaggtgtacgatttgaccaaatttctggaagagagaaccatggagtctggcagtaccg

SEQ ID NO: 883094 - DNA, 99 bp, Homo sapiens
acaaatgtacccccagtacacttactactatcctcattatctccaaaccaagttatggctgattgtcctcacacaattggtgttgaatttggtacaaga

SEQ ID NO: 883095 - DNA, 99 bp, Homo sapiens
tgacagtagtgtctccactgcatctgaagaccaaattgtgatattcccagacacccgatgccatttgctgcaaaaaacatgttttatgatgaacgctgg

SEQ ID NO: 883096 - DNA, 98 bp, Homo sapiens
ttaaacttgaattacctttgaagcagaaggggctttatgaaggcaaagaacagatggagtttgaagaatccatgagacggctctttgaatccatcaac

SEQ ID NO: 883097 - DNA, 99 bp, Homo sapiens
aagaaacatcattacaatcctcttgaaagtgcttcttttaggcagaatcagcttgctgctacactggcgagcaatgatgccattggaggagaatctatg

SEQ ID NO: 883098 - DNA, 98 bp, Homo sapiens
ttccctcagcctccggccttgtgtgtccgactcggcagcagtggtcactcctggaagcaaggcggctctagctaatttatgtattggagatgtaatca

SEQ ID NO: 883099 - DNA, 99 bp, Homo sapiens
cagttccccagttctggcagattctggaaactgtacattgaagcagaggaccagtccaccatgcctgaagtcaaagacctctcagaagccttgccagaa

SEQ ID NO: 883100 - DNA, 98 bp, Homo sapiens
tgagtatctgcaaaagttgcacaaatacctaataaccagaacagaaagaaatgttgcagtatatgaggcgtggagctatttcctatgacagttctgat

SEQ ID NO: 883101 - DNA, 98 bp, Homo sapiens
ttcgagctgtgcgggcgggcggtgagcgcccatatgggggttctggagagcggggtgtgggattggtttatcttggaagctaaagggcattgctcatc

SEQ ID NO: 883102 - DNA, 99 bp, Homo sapiens
ttcgctctactgctcggcagggcagctggcctctgggcaccggcggcccctctgcctcgcggaaaaggacaaaagatccttcatcaccgaagtgacgtt

SEQ ID NO: 883103 - DNA, 99 bp, Homo sapiens
aagtctgttcgccgccggggtctatcacccccgcccctcgcctctgcccgtgagcgttttttggctttcacccccaaccagtgaccaaagacttgacca

SEQ ID NO: 883104 - DNA, 99 bp, Homo sapiens
tccagccttgtttttcagcagctttgaggaaaagtataggtgggcaccatgtccttgaagcttcaggcaagcaatgtaaccaacaagaatgaccccaag

SEQ ID NO: 883105 - DNA, 99 bp, Homo sapiens
ggagtgatgtcttccagactcggtgctgtacccgccgcatccaggctggagaagcagaacagcacacctgagagtgactacgacaacactcccaacgac

SEQ ID NO: 883106 - DNA, 99 bp, Homo sapiens
cttcctcttgctgccagtggtagcgctcgtctggcggagctgggctcttgatggaaatgtgtatgatcatctcaaggattatttaatagccttcagccg

SEQ ID NO: 883107 - DNA, 99 bp, Homo sapiens
gagagcttgctcctgctccagttgcggtcatcatgactacgcccgcctcccgcagaccatgttccatgatcacaaaatttgtccaggatagacatagag

SEQ ID NO: 883108 - DNA, 99 bp, Homo sapiens
gagttttgctgggacgcctactccaaagcggccgggagtcgcgcttcttccccactcccgagacagtttctcaagcaagacctcccccaaatcagaaga

SEQ ID NO: 883109 - DNA, 99 bp, Homo sapiens
gaagctagaagagctctggctcgatggaaactccctgtgtgacaccttccgagaccagtccacctacatcaggcgatcagtgggtgaccgcggctgcga

SEQ ID NO: 883110 - DNA, 99 bp, Homo sapiens
tttcggaccaggaccaggaagtaactttagaggaggatctggtggtgcaggaggcaaaggtgtctggggtacacctggacaggtgtatgatgtggagga

SEQ ID NO: 883111 - DNA, 99 bp, Homo sapiens
aggtttggcatgtcgagttatggatccaacaaagattctgataactggcaaaacaaggaggagatgttaaagtaacccatcttgcaggacgacattgaa

SEQ ID NO: 883112 - DNA, 99 bp, Homo sapiens
ggcttcctagtgagtcggcggctgatttagaaggaggttcaggctacggccacctcgtgtatgcagagaccatgtgtgtctgatctgctgggatcctag

SEQ ID NO: 883113 - DNA, 99 bp, Homo sapiens
ggatgatatagcaacagagttgccctgtcaccatttctttcacaaaccttgtgtctcaatttggctacaaaaggaatggttagactctccgaactcaaa

SEQ ID NO: 883114 - DNA, 98 bp, Homo sapiens
gctgattgaggctgccaagaggaacgacttctgtaaggtatgccaatgtcttcctgcagcctgttacagatgacatagcacctggctaccacagcatt

SEQ ID NO: 883115 - DNA, 99 bp, Homo sapiens
agggttcaccagatcctaaacatgcgaggaagctccatcaaaattgtcaggcatatcatcaaggtacagtgctgtggataccaatccactttctctgta

SEQ ID NO: 883116 - DNA, 99 bp, Homo sapiens
cagaatccaagcggagagagtcagcctctggttcagactgcagtaaccaattactccaaaggtttcggcggcaaatacggtatcgacaaggacaaagtg

SEQ ID NO: 883117 - DNA, 99 bp, Homo sapiens
gcggagctgacggtggaggttcgcggctctaacggggctttctacaagagcacaaagttatcattgttgggctggataatgcagggaaaactaccattc

SEQ ID NO: 883118 - DNA, 99 bp, Homo sapiens
ttgaagatgaaaacattaaagaaggaccttctgattctgaagacatgcctcagagaaccatggctactgccaagggaatcgccataggcatcgacctgg

SEQ ID NO: 883119 - DNA, 99 bp, Homo sapiens
tgcgctgccgccgctctgaggagttaaaggcaattaagttggaatatgcaaggttggttaagttggcccaagaagacaccccaccagaaaccgattatc

SEQ ID NO: 883120 - DNA, 98 bp, Homo sapiens
acaactgcgctatcttccctggatttttcttcaccttttccttactcatgagccagatctcacattcttgaaggtggcattgaagagcactaagatcg

SEQ ID NO: 883121 - DNA, 98 bp, Homo sapiens
ttttatcttagtgattatgataactccttgtattgagcaagtcaacaacctacgagagatccaagcactgaggcgcctgaatccgcacccaaacattc

SEQ ID NO: 883122 - DNA, 98 bp, Homo sapiens
ttctctggacttccccagaagaagattgtggttgaattcagatactctccccaggcgctttatgagccctgtactcaggatattgtgatgttccttgt

SEQ ID NO: 883123 - DNA, 99 bp, Homo sapiens
aagattctttgtagcagacactgcaaatgaagctctcgaggctgctaagagactaagtgtccttgaatggccattttggacaaaactggttgtggtagc

SEQ ID NO: 883124 - DNA, 99 bp, Homo sapiens
taactcaaatatctcttcttaacacctacctgattctggcatacacagagaccacgcagaggctgcctttggatcaagtccaggaagtgcttcccccaa

SEQ ID NO: 883125 - DNA, 99 bp, Homo sapiens
ttattgatacacccacaagtccagtgacaagcggacttccactcttctttgtcattactgtgacggctatcaaacagcctgtggacatctctacagcaa

SEQ ID NO: 883126 - DNA, 98 bp, Homo sapiens
aggcaaagaacctctggtgttgaaagatatgtcttgtcgttcaagacttgcaacactaaacgagaaattgacagcccttgaacggagaatagagtaca

SEQ ID NO: 883127 - DNA, 99 bp, Homo sapiens
gaagaccattcagatgggatctttccggatcaatccagatggcagccagtcagtggtggaggccctggagatgtacaaggatgattggaacaaagtgtc

SEQ ID NO: 883128 - DNA, 99 bp, Homo sapiens
ctggacttggcttccctcaagtctatccgagagtttgcagcaaagatcattgaaggaatagccaggccagaagaaggaaggcctgtggtgagtgggaca

SEQ ID NO: 883129 - DNA, 98 bp, Homo sapiens
ttgacgaggtctgagcgaccatggaccggccggggttcgtggcagcgctggtgggaggcaaatacatgcaggcggtgattcagtatgggaagatagtg

SEQ ID NO: 883130 - DNA, 98 bp, Homo sapiens
aaatattatggatcctatctgaaggttttagctgaattttgggacatggccactgcttcaccaaggtctgatactagtaataaccacagtggaaggtt

SEQ ID NO: 883131 - DNA, 98 bp, Homo sapiens
caagactctcttcgctctttgcatcttaactgcagacttgccttcaaggtgtgcaagtaaggacttatctccagaaaagaacacttatgaaacagaat

SEQ ID NO: 883132 - DNA, 99 bp, Homo sapiens
aagtattggtgctcagaaggctaaacttggacagggtgtgattgctgccatgagagatggttttggtttcatcaagtgtgtggatcgtgatgttcgtat

SEQ ID NO: 883133 - DNA, 98 bp, Homo sapiens
ctgcacaggctgcagccaccgcagctgccatgaacaccttgcacagaatatatctaaatcgcatctggaaacctgccaatacttgagagaagagctcc

SEQ ID NO: 883134 - DNA, 98 bp, Homo sapiens
acagcccggcggcagcagctggaggaggatcgcactgctcatcttggccatcactatacacaacgttccagaatatattgcactttatccatattcaa

SEQ ID NO: 883135 - DNA, 99 bp, Homo sapiens
tatgaatatccagtttgagccatcggatctaagatccaaaagatcgataaagaattggctagtggtgaatactttttgaaggcaaatcagaagaagcgg

SEQ ID NO: 883136 - DNA, 99 bp, Homo sapiens
ctgtacttgcgtccgctacagtatgtcaatcgcttgccccagcacaggttgaccagtatctctaccacatgcgcctctctgatgagaccctcttggaga

SEQ ID NO: 883137 - DNA, 98 bp, Homo sapiens
ggtcctctccagggagaccctctgtggtaggagagaagtttgctgaggaatgccttcaagcacaaagtgatgaatgactgccttcaagtctcaagaaa

SEQ ID NO: 883138 - DNA, 100 bp, Homo sapiens
gtgcattaacatttgtggccttgtgctctttcatcggacttctaatggcgatggatgactacagtgtgatcggccgctccctgttcaaaaaggaaaccaa

SEQ ID NO: 883139 - DNA, 76 bp, Homo sapiens
aaaacagtggttttgcatatagatggccttgatgatacggtgaagattgtccccagtggatggtccctatcacaat

SEQ ID NO: 883140 - DNA, 99 bp, Homo sapiens
cgaggccgcagagctaaatgggggcctctccagggagtgctctgttcacggctccatcgctgttacagcgctggagagcgaggtggcttcaataagcct

SEQ ID NO: 883141 - DNA, 98 bp, Homo sapiens
atgaactcaaagatgaggaggatgctatctttcagatcattcagagcataaggatgggcatgtgagaaagccagggatttgacaccacctccctccca

SEQ ID NO: 883142 - DNA, 99 bp, Homo sapiens
atcgagaacagcaggcagaacattttctggagccaccatttgtaatggagaagtggattgtaggaatagcaaaaagtcagactgtggagtgcactgtca

SEQ ID NO: 883143 - DNA, 98 bp, Homo sapiens
gaggcctttcaccaagtccatgtgtgctcatgggagcttagaagatcccaaaagtataacccatcataaattaatccacgctgcctcagagagggtgc

SEQ ID NO: 883144 - DNA, 99 bp, Homo sapiens
ggtgatttctgcatttccaactgagttggttagtctgctgctaattggaattgctgcgtggggcattggcttcgggctgatttccagtctccgagtggt

SEQ ID NO: 883145 - DNA, 99 bp, Homo sapiens
gcagtctttgctacgtacagcaaaagatctcgaggaatttcgaagctacctggagaagcgttttgactttgagcaagttactgtgaaaaaattcaggac

SEQ ID NO: 883146 - DNA, 98 bp, Homo sapiens
cagctgtggaggtggaatcagtagcagcagcagcagccgcggtggcagtgcaaaaggctggcagtacagtgccctctggtggtcagaagatgctgtgc

SEQ ID NO: 883147 - DNA, 99 bp, Homo sapiens
gaaagtacaattctattgcacatcaatgatatcatcccagcggacaaggcaaaatctcagcaagttcggacctctagtacaataaggcgaacctcctct

SEQ ID NO: 883148 - DNA, 99 bp, Homo sapiens
cctgtacagcctgcagaactgtcgtcacgctgtggtacagagcacccgaagtcttgctccagtccagctacgccacccccgtggatctctggagtgttg

SEQ ID NO: 883149 - DNA, 99 bp, Homo sapiens
gcgagaggatcatggcggatggccccaggtgtaagcgcagaaagcaggcgaacccgcggcgcaataacgcaatgccaagtgagtacacctatgtgaaac

SEQ ID NO: 883150 - DNA, 98 bp, Homo sapiens
ctataccctgaagagccaactagacatcttgagcctcctgaaacagcttgaaataactgtgaatgtcccagatgtaggatgcatagctgttgttgaac

SEQ ID NO: 883151 - DNA, 99 bp, Homo sapiens
gaacaccaaccaaattgtcgccattaagaaagcacgtgtggttctcaaatataggcattctgatgggaacttgtgtgttaaagtaacagatgatttagt

SEQ ID NO: 883152 - DNA, 99 bp, Homo sapiens
aaggctctgtgcaatcctcacattcaagctgataggctgcgctaccggaatgtcatccagcgagtgattaggatgaaaactttcggaagagaaagttgc

SEQ ID NO: 883153 - DNA, 127 bp, Homo sapiens
cgccgcccgctgcctgcgccgccggccgggcatgagttagtcgcagacatggacaccaaacatttcctgccgctcgcgggctgacgcacgaggcacacaggaaggaggtggagcaggtgtatctgcg

SEQ ID NO: 883154 - DNA, 98 bp, Homo sapiens
cttcacatgtatgctcatcggggagatctttgagctcataataacctccatctcctgggtcccagcgattctcctgcctcagcctcttcctatttcac

SEQ ID NO: 883155 - DNA, 99 bp, Homo sapiens
tctgcattgcccgactccgtaggagcgcgggggcggctcctgctcttcctggactcctgagcagagggaactctaatgatccaggacaaagaagttacc

SEQ ID NO: 883156 - DNA, 99 bp, Homo sapiens
gatcttctgcggattgttggaatctaccagcggttccgccaccccagccgcagatgtttggtgaagagctgcctgacgctcaggacggagagcagcctg

SEQ ID NO: 883157 - DNA, 99 bp, Homo sapiens
aatcttggtgtttggacataggaggtggtgatggcacttctcaaatactggccaaagactcacagtccaaaagaagtaatgttcttaaacgaattagaa

SEQ ID NO: 883158 - DNA, 99 bp, Homo sapiens
tccacctttacttttacctacgttggcggccccagaagatgaataatacggcagctagtccaatgtctactgcaacttcaagtagtggaaggagtacag

SEQ ID NO: 883159 - DNA, 98 bp, Homo sapiens
gcatcttggctggcttgcagaaaagatatgcatgactcttggccagtgattctcaacctcggctgcacattggcatcaactggggaaccttcaaagct

SEQ ID NO: 883160 - DNA, 99 bp, Homo sapiens
agacaccaagaggtggttaaagccatattggagtagcgaggaatctgattccaagcaaaaaccaggttgcactgctgtgatccatcctcatctcctaaa

SEQ ID NO: 883161 - DNA, 98 bp, Homo sapiens
gataccggtgagataacatcctacatcactgaagatgatgtggtctacagaccaggaggtgagacgagagaagagcggacatttaggaactggatgaa

SEQ ID NO: 883162 - DNA, 99 bp, Homo sapiens
ggacatcgtcagagccaacacctttgttgcagagctgaagatgaggagactgtccttcctgtttcgcagatgaggaaactgaggcttagagaagtttgg

SEQ ID NO: 883163 - DNA, 98 bp, Homo sapiens
taagagcgaaccagcctgggagtgggaggatgcgcaggggttttctgcacttctacactcagagtaagcaggaaattcacaggaggtctgctcggctc

SEQ ID NO: 883164 - DNA, 98 bp, Homo sapiens
ggatattcagttgcacatccccacatcaatgcactgccaatggtgtttggcaatcaactcattcctcccaatgcacaagtgaagaaggccactgtttt

SEQ ID NO: 883165 - DNA, 99 bp, Homo sapiens
gatgtgatgttggagaactatagcaatctggttttcttgggtcatactccctgtcacaaactccagctgaactaacttggaggaggatcttccctgaca

SEQ ID NO: 883166 - DNA, 99 bp, Homo sapiens
tgccccgccgccaaagccgggggaagcggtggcgccggcgtcactctggatgaggccagggacagaactgtaccgctctctttttggccagctccaccc

SEQ ID NO: 883167 - DNA, 100 bp, Homo sapiens
ccttcctttccgacttagtcctcgggaagaagtttcagactacaagctcgttttgacaggagccattcaagtagcagacaaagtttcttcagggaagagt

SEQ ID NO: 883168 - DNA, 98 bp, Homo sapiens
agagccagcaatgcctccatgaacaatctcacccaattactctgctcaggacatgatccacatcgcggacaccaaggtcgccaggcgttatggggatt

SEQ ID NO: 883169 - DNA, 99 bp, Homo sapiens
agctggtcgccacctggcgacccttcccctccagtcacctggatgccacctgggacagcaagaccaggttctcgtggttgtcccatagggactggtgga

SEQ ID NO: 883170 - DNA, 99 bp, Homo sapiens
tttcgggtgaaaaagatgagtctgaagttatatcgcaaaatgaaacgtgctctccaggtcagtctggggcaggtaacaactgggccaaaggccactaca

SEQ ID NO: 883171 - DNA, 99 bp, Homo sapiens
ttcctttgagattggtgcatggacggaagacgatgtgtttgaccttgtctgtgtcaatgcgtggatgctggacctcacccaagccatcctgaacctcgg

SEQ ID NO: 883172 - DNA, 98 bp, Homo sapiens
ttcagaaggagcaggattaccaaagggccctgtctctgcccctggtggtcatcgtccatggcaaccaagacaacaatgccaaagccactatcctgtgg

SEQ ID NO: 883173 - DNA, 99 bp, Homo sapiens
cactgaaattcagagaggggaagtgatttgcctcagcttgtactcccgccggggtcagcttggtcagcgtccattccagccccaacgaccagatgctgt

SEQ ID NO: 883174 - DNA, 99 bp, Homo sapiens
ggtcgaagctgctgaagtggtttttcctaatggaaaatcacatacctttccaaatgtgacagtgatgataacatgggtgccaaaaatacttcaatagga

SEQ ID NO: 883175 - DNA, 98 bp, Homo sapiens
cgatgggttgtccgactgggagcagaggaagccttgaggacctactcacagataggaattgaagacaccattcgcttttcacccaagatgatttgatg

SEQ ID NO: 883176 - DNA, 98 bp, Homo sapiens
gagaagcgctggttgctggagaacatggacggagccttcttggtgctggacgagattgtggatggcgggcagcaattccatttccgtgagggcgtttc

SEQ ID NO: 883177 - DNA, 99 bp, Homo sapiens
ttgtgggctactttgtatctggatgtgatccctctatcatgggtattgcattgacaaaatctctaagataacctctccagtattaataattcatgggac

SEQ ID NO: 883178 - DNA, 99 bp, Homo sapiens
tgtgcaccgtagtggaccctcgcattgtccggagatacctactcaggcggcagctcgggcaggggagacctgtcggccatggagcctaatgatagtacc

SEQ ID NO: 883179 - DNA, 99 bp, Homo sapiens
aagaaagtaacagtgagatagagcagaatccagactccaaaatgatgcaaatcaacctgactggatttttgaatggaaaaaatgctcgagaatttatgg

SEQ ID NO: 883180 - DNA, 98 bp, Homo sapiens
aactttccctttaagaaagccacctgggcgcaccgcggtgcggacccagcacgcctgggccgggggctgcagcatgaggcatgccaaagggaggctgc

SEQ ID NO: 883181 - DNA, 99 bp, Homo sapiens
ttgccacctggtattaaacctaccatccaaatcaaacaggagtcagactggatgactatgcctgccagtaagaaatctactgtcaaggcagagattcct

SEQ ID NO: 883182 - DNA, 99 bp, Homo sapiens
ctaccttgggacatcatcagactcctacaccaaatagtacagcaaacccgctggttcagaaccaacacctaagtcacgcattgcagaccttcctcctgc

SEQ ID NO: 883183 - DNA, 99 bp, Homo sapiens
ttccactgatatctcaaaaggtgatctggacaaaggaacaggtatctcagattgtcactgctgttccaagggcacacgcagagggatttggaattcctg

SEQ ID NO: 883184 - DNA, 98 bp, Homo sapiens
aagaaatgcagggatttggtgtaatgcagaagacttgttccatgaaagtacattggggcacattgtcttcgcagttttaccgacttagaagaacttga

SEQ ID NO: 883185 - DNA, 76 bp, Homo sapiens
cctccctcagcttccgccccaaaagaatgaagctcgactgagaattgtaaaaactcttgaagacattgatctgggc

SEQ ID NO: 883186 - DNA, 99 bp, Homo sapiens
ttgcagcaaggcttgctgaggctcacagaagatagccccaggatctgtgccagttcagaagcaggcgagcctcttccctgatgaaaaagaagataactt

SEQ ID NO: 883187 - DNA, 99 bp, Homo sapiens
aaactgctggaccagctacacaactcactgaggatcgacctctctacatacaggaatccatttggatgtctgtcaactgagacgtgtgattgcagccca

SEQ ID NO: 883188 - DNA, 99 bp, Homo sapiens
gtaccttataaccttgctaaatctgcatacagagaattggttcagaagcagcattaagaggtcttctgggagccttaacaagtaccccatattctccca

SEQ ID NO: 883189 - DNA, 98 bp, Homo sapiens
tcagctctcggcgcacggcccagggcgccaatgcttcggcattagagaaagagattggtccagaacagtttccggtcaatgagcactattttggatta

SEQ ID NO: 883190 - DNA, 98 bp, Homo sapiens
gagcacagtaacatacagcactttgtggagaaagtcgtcttccacttgcacgaaagctttcctaggccaaaaagaggaaaaaagaaggggcatggctg

SEQ ID NO: 883191 - DNA, 75 bp, Homo sapiens
gtcttcgatctgcttctgatgaagctggtacacacccccaaaagaagacggctaaccctggagtatcacccttcc

SEQ ID NO: 883192 - DNA, 98 bp, Homo sapiens
atcgatctgcggggcatcgtgtctcgaccgcgtcttctgagtcagtgcaccaattccagctggacatcactgtgaaaatgggacgggataaagtccga

SEQ ID NO: 883193 - DNA, 99 bp, Homo sapiens
ccgacgaccggatcctgaggaggcagctgcggtggcagctgctgagttctcggtgaaggacagtcattttgtttactcattcagccctgttgcaggtcc

SEQ ID NO: 883194 - DNA, 99 bp, Homo sapiens
agaagtgtcagagactgaggacttaaatgaagccactgattagcaatttaaagatcctctccaagctgccactgcagagccccgccatggaagacacgc

SEQ ID NO: 883195 - DNA, 99 bp, Homo sapiens
ttggaccttccggagcttctcagaagacagagggttttcttttgagtggatcaatcttcctgtcctacaactgacaaaggatcccctaaagacccctgg

SEQ ID NO: 883196 - DNA, 99 bp, Homo sapiens
cacttcttaatgctgaagatgaaaaaagagaagaggagaaggaaaaacaagctgaagaaatggcatcaggatctcattttgcccaacggtggtactcca

SEQ ID NO: 883197 - DNA, 99 bp, Homo sapiens
atccctggcttccgtgcccgctggcattgctaaacacgtggaaagaatcaatttgggtacttctgaaattcctcagttccggctgccgtatgatgtagt

SEQ ID NO: 883198 - DNA, 99 bp, Homo sapiens
ggggtgcgagcagcgcacttccgagagaagaagaaggaggttcctgctgtgccagaaacccttaagaaaaagcgaaggaatttcgcagagctgaagatc

SEQ ID NO: 883199 - DNA, 99 bp, Homo sapiens
ttatgaccggctgagcccccatcattgggagaaatccccactcctccaagaaccaacccccaaattggctgggacaggaagctgttttaggttatgtga

SEQ ID NO: 883200 - DNA, 98 bp, Homo sapiens
tcgctgtgagacatgtctgagactcctgctcagtgtagcattaagtcggctcctccctgaagaagaggttcaagcggcgggagatcgaagccatccag

SEQ ID NO: 883201 - DNA, 98 bp, Homo sapiens
tgatttgcctcagcttgtactgagcatctttccttgaagaagtacattattgacattgtggttgaaagtacagctccagcagaagctttgaaagatgg

SEQ ID NO: 883202 - DNA, 99 bp, Homo sapiens
gacagcactgggttgaaccgtcccggcccagctcccctgagctccaggaagcacgttctctacgtggagcacaggacgactgggtttggattcagaaga

SEQ ID NO: 883203 - DNA, 99 bp, Homo sapiens
gaccagagaagagcacagaatgtaccagagagagaaagagatgacttgatgtctgcactagtttccgtaaggagcagcttggcagatacgcagcaaaga

SEQ ID NO: 883204 - DNA, 98 bp, Homo sapiens
aatttgctgtgggaagtggagcacgactcatttctgtttgttactttgagtctgaaaatgactggaaacagagcaaatgcagcgttacaatcaaagac

SEQ ID NO: 883205 - DNA, 99 bp, Homo sapiens
tggaagtgacaatgattctgtacagcctgtgaggaggagtaggccaaccttgtctatccagcatcctccatctgcagcaatcagtattcagcgtcctgc

SEQ ID NO: 883206 - DNA, 99 bp, Homo sapiens
caaataaaagagccctgcaatttgaagatacatgagacagcagccaaacccccagcatggacaaggacagcccggaggtccaccaggacctgaacgccc

SEQ ID NO: 883207 - DNA, 99 bp, Homo sapiens
ttcttgtgtggcttcctgcttcagtgctgtttgtgggtataatctatgctgggtccagagcattgtccagactggaggagacatcacagctttcccaga

SEQ ID NO: 883208 - DNA, 99 bp, Homo sapiens
cgatgatgatgatgacatcacccttacagatttgaagaacccaagtgattcagcagtgcacagcccctttacaaagcgccaggcttttaccccatcttc

SEQ ID NO: 883209 - DNA, 98 bp, Homo sapiens
gtgggataaacggagagcagcagccgcccgcttcaaccccaggggaccagaggaactcagccctgattgcggagcaggacatcgagactttacatggc

SEQ ID NO: 883210 - DNA, 99 bp, Homo sapiens
ccaaggccatctacctggacatcgatggacgcattcagaaggcttgccgctgttccgtaacccagtgattccagtcttggctgtggtatgaatcactta

SEQ ID NO: 883211 - DNA, 98 bp, Homo sapiens
ctggaccctgcccagcagaatttgtatagagatgtgatgttggagaactacagaaacctggtctccctagatcatttgaaacacagttgtcaagagtg

SEQ ID NO: 883212 - DNA, 99 bp, Homo sapiens
gcagcaagtcttagcagtggacgcgagataagaccatcatcatgtggaaactgaccagggatgagaccaactatggaattccacagcgtgctctgcggg

SEQ ID NO: 883213 - DNA, 99 bp, Homo sapiens
ccggagtgagaagcaagaaggccctggacacagcaatatctctgggctttcacagtttggaaattttagcattcaggtgccaggaatgcagatgggaca

SEQ ID NO: 883214 - DNA, 98 bp, Homo sapiens
tgtgattgagtttatattcaaccagctggaagtgaaggaatttgctgattcccttggaattccgtttttggaaaccagtgctaagaatgcaacgaatg

SEQ ID NO: 883215 - DNA, 98 bp, Homo sapiens
ccgacatggcggcagcggtggcggctgcgctggcgcggcttttggcggcctttctgctcctcgcggcccaggaagggaaaaggccgaggcatcagcgt

SEQ ID NO: 883216 - DNA, 99 bp, Homo sapiens
gctccccaggggagttctctgtgtctgtgaaatgccatggacaatattaccaggcagaaccaattctacgatacccaagtcatcaaacaagaaaacgag

SEQ ID NO: 883217 - DNA, 98 bp, Homo sapiens
gaatgaggagcaggacatcttcatttacagagcaacttgatgaaggtacacccaatagagagatctgaattctacaaacacattgtgctttctggagg

SEQ ID NO: 883218 - DNA, 99 bp, Homo sapiens
atcttaagcatgtcatgtctgatagctctttggatttaccaacagttagtggccagcatcctcctgctgcagaacattctagtatgccagtagaaaaaa

SEQ ID NO: 883219 - DNA, 99 bp, Homo sapiens
ttacactgtgatacgactgactactaatagggatgccaaaggaaaaatatgatcctccagatcctcgcagaatttataccatcatgtcagcagaggagg

SEQ ID NO: 883220 - DNA, 99 bp, Homo sapiens
ctccttggagcggagccttcagtccttagggacaccgagtgacacgcaggagcttcgggacagcctgtactccaaagattcaggtttactcacgtcatc

SEQ ID NO: 883221 - DNA, 99 bp, Homo sapiens
gccagcaggaaatacagcattaaattgttgaagactacttcacaatttccacttcctctggctgttggtgtgattgcttttgggtcagcacatttatat

SEQ ID NO: 883222 - DNA, 99 bp, Homo sapiens
aagactctccagtagtgcctttgatgctctacatgcctgccaaaattgggctttcttcaatactaaaaatgtatggaagtcctttgaaaacaccgtcag

SEQ ID NO: 883223 - DNA, 98 bp, Homo sapiens
gcagctccggcagtggctctgactcacctcacagaacctctaagtcacccagagactacagtaactttgaccaggagttcctgaacgagaaggcgcgc

SEQ ID NO: 883224 - DNA, 99 bp, Homo sapiens
acagttaggtcgtgtttccaaagagaaaaacctactcttgatacacaatctaaaaagaattaggaaggtccttcaggcttttgacctttatgaacaaag

SEQ ID NO: 883225 - DNA, 98 bp, Homo sapiens
ccagcctaatccaaagactgtggaacttttaagtggagtggtggatcagaccaaagatgggttgtttgatgtgtgcacagtgtcacgaacagacagag

SEQ ID NO: 883226 - DNA, 99 bp, Homo sapiens
agtatatgatatcactaagaaggagacatttgatgatttgccgaaatggatgaagatgattgataaggccccttcacagatgtagtcactacaaatctt

SEQ ID NO: 883227 - DNA, 99 bp, Homo sapiens
tgaacctcagcaccgagaacatctactctttcaactacaccagccagcccgaccagagtgatggtgatgattttaattacatcattgcatttttccttg

SEQ ID NO: 883228 - DNA, 99 bp, Homo sapiens
ggcagcggagggacggcagtctcgcgcgtaacagtgtatcatgtatgccactgattccaggggacactcccctgctttcctccaacctcagaatggaaa

SEQ ID NO: 883229 - DNA, 98 bp, Homo sapiens
ctgtctggaaggccagatacacagtgccatgtttcagaacagagtaagacccctggtaaagaagaactgaagatattatacagataccagatatagcc

SEQ ID NO: 883230 - DNA, 99 bp, Homo sapiens
ctgcctgtgtgagcagtctctggacaagatgaccacactccaggaatgccagtgcatcttttgcacagctgaagaagaaatgccagaggtagaaattga

SEQ ID NO: 883231 - DNA, 99 bp, Homo sapiens
gtgccttaaccgaattcctcatgggaggaagaaccattctgacaaagatcaatgtaaccactgtgcgggaatatctgccagaaggagacttttcaataa

SEQ ID NO: 883232 - DNA, 99 bp, Homo sapiens
ctggtgccactcccaaaaaactatcaagttgggatcaggcagagtgctgcaggtggagaaattttcagcctgtgtttacctgagttggctgaaatggtt

SEQ ID NO: 883233 - DNA, 99 bp, Homo sapiens
aaagccgttgagaggaccatcacaacctgagcagcacagtttgcagttaacatgtttcgaacattaccaccttcctccaatcctacgggagcggaattt

SEQ ID NO: 883234 - DNA, 98 bp, Homo sapiens
cagtccagtgctaggaaacattcccccaggagatggcatgccagtaggtcctgtaccaccagggttctttcaggactgactgcattgcacagatgatg

SEQ ID NO: 883235 - DNA, 98 bp, Homo sapiens
ggagagaactgctggaaggagactggatgatagaattggaacagaaagaacagcttcaaaagatgaaagacttcgggtctgagccacagatggctgac

SEQ ID NO: 883236 - DNA, 99 bp, Homo sapiens
tcttctttgcctgcactaatggtcccgtgggagtagggctgaatgaactgaaacgaaagctgctgatcagtgacacccagcactatggcgtgacagtgc

SEQ ID NO: 883237 - DNA, 98 bp, Homo sapiens
tctggcccattaacaagcagctcttccggaagatcaactgcagactgtcctattgcatctcaagcccgtggggtagagcagcggctgccatgctcttc

SEQ ID NO: 883238 - DNA, 99 bp, Homo sapiens
tgttcgtgattatatttcttggagttgtgttggtaatgaagaaaaggtatgccaccatatacaccatgttcccagtgttctccttagtgctggaccagg

SEQ ID NO: 883239 - DNA, 99 bp, Homo sapiens
gaatatatcgcagtagttaaaaaactagatccaggttggaatcctcagacaaagaaacagccttggtataatagcacgttagcatcaagacgaaaacga

SEQ ID NO: 883240 - DNA, 98 bp, Homo sapiens
agaaaggtggatcctacatgtgccataggtacctaggtgctgatatggaagaatttcatggcaggactttgcacgatgacgacagctgtcaggtgatt

SEQ ID NO: 883241 - DNA, 99 bp, Homo sapiens
tccgccccgcgtctccgcagcgcgcccaactgcatcctcctggccatgttcctcgtccactacgggcatcggccttcacctaccaccatatccaggaga

SEQ ID NO: 883242 - DNA, 99 bp, Homo sapiens
tagaagtctactaatggacagttagtcacccacctacatgttgaggtaatgagaggccctaagatcccagaggatgccataagaggaaaagtcagggga

SEQ ID NO: 883243 - DNA, 99 bp, Homo sapiens
aagatctcaagatctggactactgttgaaaaaatttccagtgagacacgttggtcgtcattgcctccgagcccactttagccctcagctctgtatcaga

SEQ ID NO: 883244 - DNA, 99 bp, Homo sapiens
ggccccaccagcagaaggccctcaccagatgtgactccttgaccatggacttcccagcctccagaactgacttgaactgccatgtcctctgaagaagga

SEQ ID NO: 883245 - DNA, 99 bp, Homo sapiens
gagaggctgcagggggagcacagccagaatggggaggaggagcctgagtcagtgccacttagtgcattagaactaggtttggagaccgaagcagcagtt

SEQ ID NO: 883246 - DNA, 73 bp, Homo sapiens
aaaacttcagatatgggatacgggtcctgctgcgtgtccgcatgctgtactacctaagacaagaagtgatagg

SEQ ID NO: 883247 - DNA, 99 bp, Homo sapiens
tctgatggagctgaagcaggaagccctcacctttgccaggaactggggggccgactatatcctggtgtgtgtcctgggcctgcacctggccaaggagct

SEQ ID NO: 883248 - DNA, 98 bp, Homo sapiens
ccgctggggctgccgccacggccgcccggagaaatgtgcggagattattgtggctcaccttggctacctgaactacactcagtatacagtgatagtgg

SEQ ID NO: 883249 - DNA, 99 bp, Homo sapiens
ggcacggaaacacccgtaccttacccaactctactgctgcttccagaccaaggagtagctcggagaggaggaaggagaagtcccgggatgctgcgcggt

SEQ ID NO: 883250 - DNA, 76 bp, Homo sapiens
cgaaggggaaccatgcgaccatcaccaagactgcctgccaggtgattctcctaggtcactggctgctgacaacctg

SEQ ID NO: 883251 - DNA, 76 bp, Homo sapiens
gaagttcagttcgcccaacatggaatgacttgagtctcttcaggacagaaagtcatgttctatgtctcctcaggac

SEQ ID NO: 883252 - DNA, 98 bp, Homo sapiens
gggcagccagcacaatcgggcggaggtggcgctgccccttcaggtgaactactgagttcttcattatgtctgatggagattatgattacctcatcaag

SEQ ID NO: 883253 - DNA, 76 bp, Homo sapiens
actgtttggaaagggccctcaaaatgccttcttcctcgtaaaattctgggtggtgctggctagagtgtatacgttt

SEQ ID NO: 883254 - DNA, 75 bp, Homo sapiens
gtgtcctcgcgagacaagctcaccgaaatggccgcgtccagtcaaggctaaaaggtcagattcctgaaattaaac

SEQ ID NO: 883255 - DNA, 98 bp, Homo sapiens
aagcttcaacttgtgcacaaaagtgttgtgcatttaatgatgaatgcccagaaagaggatcgtgttccagtgcttgaggagtacagagagtacaagaa

SEQ ID NO: 883256 - DNA, 76 bp, Homo sapiens
ccggtttctcccacatcgacctgggctgcgagacaaccatccgtgtggtgtccatggacagagactaccacgtggc

SEQ ID NO: 883257 - DNA, 99 bp, Homo sapiens
tttaaaactgaagattgtcatgattgtttatcctaatcccaatgctgaagtaagattgtcttggaaatactaagttggaccactttacctgcattgtga

SEQ ID NO: 883258 - DNA, 76 bp, Homo sapiens
aaggaaactagcacagacccttggtcttgaagttctagggttatgtaccgaaggactctaccgtgtcagcgggaat

SEQ ID NO: 883259 - DNA, 100 bp, Homo sapiens
tttcctcaggactccagattatctacaacactgatgagattttagatgctgtgagcctagaggagcggttcaagatgactataccactgcttgtcagaca

SEQ ID NO: 883260 - DNA, 76 bp, Homo sapiens
gggaggaaggcgaagctgcagccaggaataccagctgatgtcagtccgccagccaaaaccagggaggagaagcggg

SEQ ID NO: 883261 - DNA, 99 bp, Homo sapiens
tccaagcgtgaccagctttctgttgggaacactcaaaggtgcacagatgaacagttcactactgcctcaagatgcagtgagcagtaatctaaggaaaag

SEQ ID NO: 883262 - DNA, 98 bp, Homo sapiens
atttaagcactattattcatgaggcaaatgaggaacagggcaatagtatgatgcacaagttgaccccggaatatctggagctcaaaaagtaccaggcc

SEQ ID NO: 883263 - DNA, 99 bp, Homo sapiens
ttagtccagcaagtcctcatagccaggatgaatcagaactccttacggttcctgatggttggaaggaaccagctttttccaaagaggacaatcccagag

SEQ ID NO: 883264 - DNA, 98 bp, Homo sapiens
cccagccctggagaagctcaaaggcaaagacatcaacgagtgtgcaacaccgtcgaaagtgtcatgcggaaaattctcggactgctggaacacagagg

SEQ ID NO: 883265 - DNA, 76 bp, Homo sapiens
tcaaaggcaagtacatctgtattcaactgggtaaagggaacacgggtctggctgagagaaaatggccagcattttc

SEQ ID NO: 883266 - DNA, 76 bp, Homo sapiens
gcaagagcagaggccttctctagaccttgccaagatggcacaggtatttacttatgggatgtagaaggcagaaaat

SEQ ID NO: 883267 - DNA, 99 bp, Homo sapiens
ggcaggtgccgggtctggaagctcccctggtggccagtcccctgcatctgaacaactctgctcatggtgattacatgcaaaataacgagagcagcttaa

SEQ ID NO: 883268 - DNA, 75 bp, Homo sapiens
gtttgctctcatgaacatgcaatgagaagactgatcaatctggccatttatgccagtgttcttcctggagagttg

SEQ ID NO: 883269 - DNA, 76 bp, Homo sapiens
gaagttgatgccctgtgcttcctgtacagctgcggaacctataaatgacatcgcatttaagcctgatggaactcaa

SEQ ID NO: 883270 - DNA, 76 bp, Homo sapiens
gctattgcagaatttttgactggagactatagtaggtggatctcgagccagaggggaaagtatttgtggtaataac

SEQ ID NO: 883271 - DNA, 99 bp, Homo sapiens
ggaagggagatgcagcatcccagtttttggtcttctgtcaaaaacacagggatgaggacttgaaaatactggaaatctgtccggatccaaattattttg

SEQ ID NO: 883272 - DNA, 76 bp, Homo sapiens
gcgggaccgcatcgaccgcctggagattctcttcaggggaagagtccacatcccacctcatcatgtcccgaagaag

SEQ ID NO: 883273 - DNA, 99 bp, Homo sapiens
atcgcggccttcttccgatccgtgaggaggacatgtaccgtgctgcagatgaaatagaaaaggagaaagaattgcttatacatgaaagaggggcatcag

SEQ ID NO: 883274 - DNA, 99 bp, Homo sapiens
gccgctagcgtcagcgccagccagctctcaggtgtccggcatccatgagatgatggggtgcattaagagacgagtggatcatctgaccgaacagtgttc

SEQ ID NO: 883275 - DNA, 99 bp, Homo sapiens
aaaagacagtcctcgtcagcactgactttcagctatggaatcgtgatgaacggcagcagccactcaccaacagccatcaatggtgcaccgtgcacaccc

SEQ ID NO: 883276 - DNA, 76 bp, Homo sapiens
cgaagatgtcgttgcaaagaagggcgagactataatgcacctgatagtggctttgaagcgtatgttgaatttcaat

SEQ ID NO: 883277 - DNA, 76 bp, Homo sapiens
gaatatgctgtcttttacccaccaaatgttcatcagagaagatatgaaatataaagatgctactaataaacacagc

SEQ ID NO: 883278 - DNA, 76 bp, Homo sapiens
agatcctaactatgatgatgaccaggtgaattatgtaacctcattacgctggatgtagctcacaatcaacttgaac

SEQ ID NO: 883279 - DNA, 75 bp, Homo sapiens
aaggaaactagcacagacccttggtcttgaagttctaggaagatgatccctatgatcttgaagatgtttctgcac

SEQ ID NO: 883280 - DNA, 75 bp, Homo sapiens
ctaccactagcaaggaagacccggcctccagcacaggagggattaaaggttttttcacctcggagatacttcaac

SEQ ID NO: 883281 - DNA, 75 bp, Homo sapiens
gtatggtcaacattgatggaaaacaaatcaaactgcaaatctgggatacgaagagacgctcaaaccgccaagtta

SEQ ID NO: 883282 - DNA, 99 bp, Homo sapiens
atggacaaacagtcaaacttgtgtgctcagttactggcatggcactcccaagattggttcgcatggctctgaaaaaggccgaaaaagaatttgaactga

SEQ ID NO: 883283 - DNA, 98 bp, Homo sapiens
ccgaactccaggacagcatccaggcctcattggacagcattcgagggggaaccgtgaaggactgagccgcacctcaagcagccgccagagcagcacag

SEQ ID NO: 883284 - DNA, 99 bp, Homo sapiens
tgcgcttggccgggcgggctggaggctcctgcagctgcgatgcctgcccggactgcacatgtgaggagttctgccccgagtgctcggtggagttcaccc

SEQ ID NO: 883285 - DNA, 76 bp, Homo sapiens
gtttggcggcatgaacctgacaagagatggatttttacctcctataactccaccagaaaagttttttctttcccag

SEQ ID NO: 883286 - DNA, 76 bp, Homo sapiens
ggggaggttacgcagcaaaccatccagaaggatgaagactccgggaaggctgacagcgacgtggctgacgacgtgc

SEQ ID NO: 883287 - DNA, 99 bp, Homo sapiens
gctaaaggatgtgaccattttggcagctactaaccgtccagataggatagacaagtggttggactgagtcccatgaagccagatcacttctgactgcaa

SEQ ID NO: 883288 - DNA, 100 bp, Homo sapiens
aaaagatcagcgaggagcagcagcagctccagcaggcgctggctcctgctcaggatgtgaggtctggaacagctgcagccattttgccaccatgggaaac

SEQ ID NO: 883289 - DNA, 98 bp, Homo sapiens
taaattctgtggatgatgttttctcacccagtcatgattgtctttggctatagagtttttttttttaaagattactaaacatacaggaagtgataaga

SEQ ID NO: 883290 - DNA, 76 bp, Homo sapiens
ctgggacaatgaatactgcagcaatgagtgtgtggtgaagcactgcagtttttggagatagggacctcaccatgtt

SEQ ID NO: 883291 - DNA, 75 bp, Homo sapiens
ccgggatgcctgcaccattactgatcaagaagctactctagaagtcggagcagaggatggtacagcagaggccga

SEQ ID NO: 883292 - DNA, 99 bp, Homo sapiens
atcaacaatgagtacaactaccgctgctggaccacaaaccgctgccagaaaaggaatggatttgtaaactcaagagcttctccaaatttgattggagct

SEQ ID NO: 883293 - DNA, 76 bp, Homo sapiens
gaagagctgcttgactgtgagaccctcattgaccagtatttaagagttcctgaagatgatggagggcgtgcagtaa

SEQ ID NO: 883294 - DNA, 100 bp, Homo sapiens
aaggtggcaaggagcagaagcagcccttacaagttgcaaagggttgccacaccatttggaggttttgaaaaagcatcaagaatggttaaatttaaagttc

SEQ ID NO: 883295 - DNA, 100 bp, Homo sapiens
tggtgcacgctgccacgctcatctgccgcgggctggactacttcagcagcctgtgggattatgaagaagctgtgctcttgctgttagaaggagctgcctg

SEQ ID NO: 883296 - DNA, 99 bp, Homo sapiens
caaaaccatgggctgggctgcagcaaaatgagggtgtactcagtgcactgaggcccatgtaccatgagagatggtctctgaaagaagatgaatttggct

SEQ ID NO: 883297 - DNA, 76 bp, Homo sapiens
tcatagttgaaccgtcctggaatagaagttgaagaaatatggagatcaacacaaaactgctcatcagtgttacctg

SEQ ID NO: 883298 - DNA, 99 bp, Homo sapiens
gcttccctgtttcatcagcttcagatcctggtctggaaaaattggctaggtgtaaaaaggcagccgggcgacataccttctgttgaataccttttacaa

SEQ ID NO: 883299 - DNA, 99 bp, Homo sapiens
gtgatggaaccacgccctactgttgctcctactacgcttatattgggaatatcctctcgtctaccctgaactgcagatcaccaatgtggtagaagccaa

SEQ ID NO: 883300 - DNA, 76 bp, Homo sapiens
tggctctctcaaagcaccgtggaatcaaccaagccctcggtcctagcagaagatgtgactcagactgcctctgggt

SEQ ID NO: 883301 - DNA, 76 bp, Homo sapiens
agtccaagttcaaccaagccattgtggacatcttcaataaggagctactgctaatccccatccacctggaggtgca

SEQ ID NO: 883302 - DNA, 99 bp, Homo sapiens
agtattcccacaggaggtggctgatcgactgcttcggaccatggcttttcatgataagaaggctgactgcacaatcacaatggctgactcagacttcct

SEQ ID NO: 883303 - DNA, 75 bp, Homo sapiens
tcctagatggcaaggacggggactttgactacaggtgtgctgatgtatcgggactaccccctggaactattcatg

SEQ ID NO: 883304 - DNA, 76 bp, Homo sapiens
gcgagtggagctacctgagaggaggtgggtgcctgagtctgcacgctggcttctgacccaaggccatgtgaaagag

SEQ ID NO: 883305 - DNA, 99 bp, Homo sapiens
ggacacataacatagaagtaatcgtccaggaaacccagaagttctgtgaacaagtccatgctgccatcaaggcatttattgcagtgtactatttgcttc

SEQ ID NO: 883306 - DNA, 98 bp, Homo sapiens
ccacagttcctaccttatgagctcggttttcttatgcttataagagtggaacaggactaatttattattgtgcaactgccagtcctgcgcattccagc

SEQ ID NO: 883307 - DNA, 99 bp, Homo sapiens
acagatttgctgccacagaggctgatggacaaccaggcggagagagaaagtgaggctggtgttggtttgcaaagggtctcgctcacctctcccctggcc

SEQ ID NO: 883308 - DNA, 99 bp, Homo sapiens
ggtgttcgactgctagagccgagcgaagccaggtggcctagaagaatcggcagtgacaggaattgtcgtgggggctttactaggagctggcttgctaat

SEQ ID NO: 883309 - DNA, 76 bp, Homo sapiens
caccaggccgccgggggcctgctgcgcccgggagagaacattgaaagtattctctaagctatttgaagagagtgac

SEQ ID NO: 883310 - DNA, 98 bp, Homo sapiens
cttcacctggatgcctcatagccatttcaaatccacctagtcattcaaagtagaaacccacagaatgccgtatatgtagtagcacttttcaaagaagg

SEQ ID NO: 883311 - DNA, 76 bp, Homo sapiens
ggagccagttaccatgactcatccaggtcttctcgtgggcaccctggacgtggtgctggactccagtgcccgcgtg

SEQ ID NO: 883312 - DNA, 76 bp, Homo sapiens
atggggccctctccatttctcctctcagcagaagtccaggttcccatgcaggatagatcactgcgaccagaggaaa

SEQ ID NO: 883313 - DNA, 76 bp, Homo sapiens
gctcttcagccaaatgcccattcgcaaaatgcggagtctcactctgtcacccaggctggagcacaatggcatgacc

SEQ ID NO: 883314 - DNA, 99 bp, Homo sapiens
tcagatggcagacatacatcatttaaaggaatgaagatgttcgaccacacatcagagacagatttcgcttgcatgatttgctgcccccagattaagtac

SEQ ID NO: 883315 - DNA, 76 bp, Homo sapiens
gcctctactacctctggatgtgtcagaagttgagtagcaggggcctaggagggctcgaagccttcacagcgatggc

SEQ ID NO: 883316 - DNA, 76 bp, Homo sapiens
gtggcccagacagcagacgccaggaggacactggaggtgaagaaggaagctcttgactctcctaaagctgatccca

SEQ ID NO: 883317 - DNA, 76 bp, Homo sapiens
ggatggcgtctccccgactccacctgagggactggctcctggggttctgcggcatgaggaatttgaagaaggctgc

SEQ ID NO: 883318 - DNA, 99 bp, Homo sapiens
gggattccacggaccaagtctgtagagagcctacgactagatttgcatctttacgtcctgcgcggaggctgctacacacatgcagaagtcatgctggtg

SEQ ID NO: 883319 - DNA, 98 bp, Homo sapiens
tgcaagtcgggatactttcagttcaacaagatggaccactcctgccgaggccatggcgagtgtcactgcggggaatgcaagtgccatgcaggttacat

SEQ ID NO: 883320 - DNA, 99 bp, Homo sapiens
tggggctggccaggcctgtcaggccatggggaacctctaccatgacacatgcttcacctgtgcagcttgcaattaaccagaagggctcggagaagccac

SEQ ID NO: 883321 - DNA, 76 bp, Homo sapiens
gtcacacacaacgcttgttatgttttcatcacttctctccagaaggatgatgaaattaaccagcagagccagctgg

SEQ ID NO: 883322 - DNA, 76 bp, Homo sapiens
ggtgctgagatgtttcgcagagtccacgtgcccggttatgtaccgaaggactctaccgtgtcagcgggaataaaac

SEQ ID NO: 883323 - DNA, 76 bp, Homo sapiens
gtgctgcagccagggaccgctctcttctctcgccgacaggtatggtctggctctatcgcccaggctggagtgcagt

SEQ ID NO: 883324 - DNA, 98 bp, Homo sapiens
ggcccccgccccattccgttcgcggtttggaaagcagagtggagaacaaagagttgattccaatgcaacaaattttagaagaagcggagccacagggg

SEQ ID NO: 883325 - DNA, 98 bp, Homo sapiens
caacatggcggcggccgtaaggtgcatgggtagaggaactgatgagaaaatgctcatcagcattctgactgagaggtcaaatgcacagcggcagctga

SEQ ID NO: 883326 - DNA, 99 bp, Homo sapiens
gaaggaacccgagcagcccccggccctgtggaggaagctttatcctgtggataaacgcagagtgaacgagtttggggagtcctacgaggagaaggccac

SEQ ID NO: 883327 - DNA, 98 bp, Homo sapiens
tcagattcaggatgcgcgcgcagcgctctccgcccagcggaagttttcgctgggcaactgagaagaaatcttcccaaggctgcagacaccgacggatt

SEQ ID NO: 883328 - DNA, 99 bp, Homo sapiens
gactggatgggttaggaggaccaggtgtacaactaggaagcccagataagaaaaagcgcaaggcaaatacacagtggctacacaaacaagctgaggcac

SEQ ID NO: 883329 - DNA, 75 bp, Homo sapiens
ggtgcagtttttgatgaaattgtagagaactaagtgtatgctgacttgtaaagtgaagaagccagtggtgctgcg

SEQ ID NO: 883330 - DNA, 99 bp, Homo sapiens
ctatcccaggaatacagctttgcattaggaatctatcttctggatttaatctacattgattctgcatatcctgcctcaggcagtatcatggaaaatgaa

SEQ ID NO: 883331 - DNA, 99 bp, Homo sapiens
gacgaggcagctgagttgatgcagcagctgtccatcccacatggcttccagaacaaggaggctgctagctccccaacaccatccatcacccttagccag

SEQ ID NO: 883332 - DNA, 98 bp, Homo sapiens
gatcttgcaaactcagatgcgctgaagctagctaaagaagttgatcctcaaggtatgtaaccactgaagtacacacacatgacatggagccgtcaaca

SEQ ID NO: 883333 - DNA, 76 bp, Homo sapiens
ccggggagtccctcgccacctgcaagagcctgcagcagtcgcttctccgcagggataaacgcccaggcccggaggc

SEQ ID NO: 883334 - DNA, 76 bp, Homo sapiens
atttcagacatctgtagcaatggaaggattgtgcagactggtgcttaaaatggaagtcgatattaatggagagtct

SEQ ID NO: 883335 - DNA, 100 bp, Homo sapiens
tttataccagctgattacttggaatccacggaagaatttattcgaagacgtcatgatgataaagaggtcactcctggaagcaaggcggctctagctaatt

SEQ ID NO: 883336 - DNA, 75 bp, Homo sapiens
tttgtttcgtgtacccaagtcccactctgaagaggcgctcttaaaattggccagctatgtgtatccatggagaca

SEQ ID NO: 883337 - DNA, 99 bp, Homo sapiens
atcaaccatctggatattgctccttcgtgtcgtgaaaactacccctaaaagccaaaatgggaaaggaaaagactcatatcaacattgtcgtcattggac

SEQ ID NO: 883338 - DNA, 75 bp, Homo sapiens
aagaactctgccaaagaggaaaccaagtttgcacagcttggtgtgtgccttgcctagtttcacttgatactcttc

SEQ ID NO: 883339 - DNA, 98 bp, Homo sapiens
cgagcgggcggcgggcgcgcgcaccatgggggagaaacccgggaccaggtcctacatcgccaatcgagtgactgacaagctgacacctattcacgacc

SEQ ID NO: 883340 - DNA, 99 bp, Homo sapiens
ggaagtgctcctgctgggcctcaaggaccgcgagactgacaggccaactgttatagaatacgatgatcacgagtatatctttgaaggattttctatgtt

SEQ ID NO: 883341 - DNA, 99 bp, Homo sapiens
gggaatatttaggatttgcatcaccagagactgcctgcgctgctgacttaaggccccaacaccaaacacagaagcaacagccttacacagagtgttcag

SEQ ID NO: 883342 - DNA, 98 bp, Homo sapiens
gaagaagacatggctcaggatacgatcatctacactgacgaaagctttactcctgatttgcaagacatctgtatagattctgcttcatccgtgagaga

SEQ ID NO: 883343 - DNA, 99 bp, Homo sapiens
tttgttcttgctcttgttttgccctcaattgtaattctgggtgacttaatgaaaataccaagttctgaattgaggatacaaatttgtaagtgtattgtt

SEQ ID NO: 883344 - DNA, 76 bp, Homo sapiens
gaactcaaactttttgtatctcgacactctgcaagattctctcctgaagtcccagctaaaagatacctacttacag

SEQ ID NO: 883345 - DNA, 99 bp, Homo sapiens
ccccaaacaacaccaacccatttggttccacattctgctttggtcttcagcgaatgatctttgagctgatccagtgtctctttgggccacttcaggcgg

SEQ ID NO: 883346 - DNA, 72 bp, Homo sapiens
tcagattgaagctgaaaaggctgaattacggtatgtaggaaaccttcccagaatatttgactactcgccttt

SEQ ID NO: 883347 - DNA, 99 bp, Homo sapiens
ccatgtcccgctacctgcgtccccccaacacgtctctgttcgtcaggaacgtggccgacgacaccaggaaatggccagtgatgaactgagggagttgag

SEQ ID NO: 883348 - DNA, 99 bp, Homo sapiens
atcatcaagcgcaagcacaccctaccgaattacaagatcagtgtgacaaaattaggcaagaacgagatgaagccgttaaaaaactggaagaatttcaga

SEQ ID NO: 883349 - DNA, 76 bp, Homo sapiens
agaagcgtctgctcaggttgcagcaggagagaggcttgtccagccggaagccctgagggcagctgttcccactggc

SEQ ID NO: 883350 - DNA, 76 bp, Homo sapiens
gtcactcaggacaagcttgaaggctgaacataacttctttttttcaaagttccctgtgttgtgaactgagcttggg

SEQ ID NO: 883351 - DNA, 74 bp, Homo sapiens
gagacgcagggacaggttgaggctgcaccaagtgttcttcctgtggtgccaacagaagaaacgggccagacagg

SEQ ID NO: 883352 - DNA, 99 bp, Homo sapiens
attgcacccttgcacttcctggaggtgaaactgggcaagaggccccagcccgtgaaaagtgaggttcttgctgtgttgcccaggctggtcttgaatcct

SEQ ID NO: 883353 - DNA, 74 bp, Homo sapiens
tctttctttctgggaccatctggattcatatccttcgaaaacgacgaagcaaggtctcgctgtgttaccctggc

SEQ ID NO: 883354 - DNA, 98 bp, Homo sapiens
aaagatgaaatcttgtcccttatccatgttttcaggcccgatatctctccctattttggcctattctatgagggaatttcggacatcgatgaagagtt

SEQ ID NO: 883355 - DNA, 99 bp, Homo sapiens
atacccttatttgtgaaagcatcaaagcgctttgaagagtccaaagagattactccaggcccagcaacatatgagacccaacatgagtgaagtttcctg

SEQ ID NO: 883356 - DNA, 99 bp, Homo sapiens
ggcaataagactctttaaagaaggcaaggagagaatgtatgaagaacagtcacaggacagagcaaccatctaaacctgaaattgtaagcaaagcactgt

SEQ ID NO: 883357 - DNA, 76 bp, Homo sapiens
tctgcatcagggctgccatagagcagtccgtgaaggaaggagaggaggctggtcctggacccaagccagaagcctc

SEQ ID NO: 883358 - DNA, 76 bp, Homo sapiens
cccagagccacttctcaccgagatgattcatgaagaagaagaaaggtggggcgaagccagcaatgacgaggacgat

SEQ ID NO: 883359 - DNA, 99 bp, Homo sapiens
ttaatcagccaagtagactcctgcagatggatcctgtgcaaaaagcggttattaaccatacatttggagtatccattcccccaaagaagaaacaagtta

SEQ ID NO: 883360 - DNA, 98 bp, Homo sapiens
aggaaggatgcagagagaaaggagaggagtaaatgcaaagggacagcaggtatttctgaaagatatctggccgactagagacgagatccaggcagtgg

SEQ ID NO: 883361 - DNA, 98 bp, Homo sapiens
acgacgctgctgggtccgctgagcggggcgacccgagggcaagtgtccagagaatggctgggatgaaagtacacttgaactctttttacatgaacttg

SEQ ID NO: 883362 - DNA, 99 bp, Homo sapiens
gaatggttacatggagccccactaccgctttttctcctccgtgacagccagagtaatccaaaggcatttgtactcacactgtgtcatcaccagaaaatt

SEQ ID NO: 883363 - DNA, 99 bp, Homo sapiens
gctgcagtcggcactgctactgcgaagacagctggcaggttacctgtgcatgacagatgagtggttctctgagtatgtctacgaagtggtggtggacag

SEQ ID NO: 883364 - DNA, 100 bp, Homo sapiens
tacatgcccaagaggggacttgatgttaacaaatgtgagattgccaggccgagcatgtcgggactccacctggtgaagaggggacgggaacacaagaagc

SEQ ID NO: 883365 - DNA, 99 bp, Homo sapiens
tggacggggccaccggctggagcggatcccacacctccggaccgagggacgcggctttcggaaaatgtgattgatcgaatgaaggaatcctctccatct

SEQ ID NO: 883366 - DNA, 98 bp, Homo sapiens
gagccgcggggagaaggccatcacccaggtcagcaagggcacctgcgagcaagattcttctgcacagtcagtatcctcgggagttcgtgcaccatctc

SEQ ID NO: 883367 - DNA, 98 bp, Homo sapiens
cttcgagtccggactcgacctctcggacgcggagcccgacgcgggcgaggccacgattacaccaggaagcaaggcggcagctgccaacctgtgtcctg

SEQ ID NO: 883368 - DNA, 76 bp, Homo sapiens
cggcacccccggccccggagctgcctggaggcggccgcactcggaacaagaatgtggtggtggctgacttcgggct

SEQ ID NO: 883369 - DNA, 99 bp, Homo sapiens
ggagtcagagacattacatcaggaagatactgcagagatattctactccatctcattcattgtacagggttacacatcattttggaatgactgtatatc

SEQ ID NO: 883370 - DNA, 99 bp, Homo sapiens
gctactttagctaaggcatgaccagcaatgaacagtagtaaggtgtgtggaggtcattgcaaaggaaggacaaaacctgaaagagctatatttggtgtc

SEQ ID NO: 883371 - DNA, 76 bp, Homo sapiens
ctcacaagctctgcagacaagaccctgtctatatgggatgcaagaacagggtaaaagcatgtctacgaagaaaagt

SEQ ID NO: 883372 - DNA, 99 bp, Homo sapiens
ggaaggagtatagatgacataggtcacctcattcatgaaggcctacagaagagaggagccttcaggggaagtagaggtggccgaggttggggcacacga

SEQ ID NO: 883373 - DNA, 75 bp, Homo sapiens
ccgcgcgctgcccttcgcttgaggtacatgggacagtaggagaaccttggtggatttgggtagaagatcctacaa

SEQ ID NO: 883374 - DNA, 76 bp, Homo sapiens
cttcactctgggaaaaggcactgaagttggccaatgaacttccggcagaactaaccaaaaatgaacgtatattgcg

SEQ ID NO: 883375 - DNA, 75 bp, Homo sapiens
gaaggggttgtcctcacttctgtgcaacttcactaagtccatggaagaaggcatctatcgagctgtgcctattcg

SEQ ID NO: 883376 - DNA, 98 bp, Homo sapiens
ggtagaggacgtgttagacaagttcatgagggcctctgaaaaatggaaccaaattctctgaggactaaagtcccagctttcttatctgatttggggaa

SEQ ID NO: 883377 - DNA, 99 bp, Homo sapiens
ccaccatgccagtctctccggcaggcagtcacaagcagcagaacttcgggttggagcagattaagcgagtaaaagactcggatgatgtacctatggtgc

SEQ ID NO: 883378 - DNA, 99 bp, Homo sapiens
gcggccccctgttgtgttgctgcggagagaacatcatcaagaaggtgatcgggcagaagtttgtgtacaagtttgtctctttcccggagatcctgaaga

SEQ ID NO: 883379 - DNA, 100 bp, Homo sapiens
gtgcccaccacccttccctctgccacgcaggtgccgatggaagtccttaaggtgcaactgccaaaagaactggcgtaagaggcaacagagccatctagaa

SEQ ID NO: 883380 - DNA, 98 bp, Homo sapiens
gagacttcagcacctgccatcaccactgtaacggtgccaactccaatttaccaaactagcagtggacagtatagaggtggaatttaattctcctcccc

SEQ ID NO: 883381 - DNA, 99 bp, Homo sapiens
tggtcaggaggcgcgtgggcggcaggtaatattttcatatctcgaacctcaatcccaaatgctgcctctgaagaaggagacgaagatgattgggcatcc

SEQ ID NO: 883382 - DNA, 98 bp, Homo sapiens
cagccgccatggatagcgacgacgagatggtggaggaggcggtggaagaatgtgaaaacctttgcatcttctgatagtctagccaaggtccaagaagt

SEQ ID NO: 883383 - DNA, 99 bp, Homo sapiens
tgctattgacctgcacacccccagtattacattacatcagcatttgacattgtgcagcaaagaaatggttatggagaagcccagtccgctgcttgtagg

SEQ ID NO: 883384 - DNA, 99 bp, Homo sapiens
cggctcaacccaccgctgccgaaatgaagtataagttagttgaatccatggacatgaaacccacagatatagagggttggcccggtgcagtggctcacg

SEQ ID NO: 883385 - DNA, 76 bp, Homo sapiens
agaaaatcagccatttccttctcttaagatgattggccatctgcaagcttcccttctccgtggagagcaggaagac

SEQ ID NO: 883386 - DNA, 99 bp, Homo sapiens
gtgaagtgagcaaatacaacccagcagtaggttattgaagacagcagccccaggttgcttagccagacaatgaaggatcatctagtaagagtagcaaat

SEQ ID NO: 883387 - DNA, 99 bp, Homo sapiens
ttctctgaatgatgaatacttttactactgtgacaacattaacggtcaaggatgcattccaggaaagttctataaaaatataccatcaactccaacctg

SEQ ID NO: 883388 - DNA, 99 bp, Homo sapiens
tggcttccaacttaagagcgcctatgaaaataacttgatgccttacaccaattacacctttgatttcaaattggatatgtcaagtgaccagatagctgc

SEQ ID NO: 883389 - DNA, 100 bp, Homo sapiens
gaagcggaacaaaaatgttgaccagtatgttgtcagggtccaaggatggcagaatagctgtgaaggcatgtgaaggcttgatgctgttagtaagtttgcc

SEQ ID NO: 883390 - DNA, 98 bp, Homo sapiens
gcagccgatcatggcggatggcccccggtgcaagaggcgcaaacaagccaatcccaggaggaaaaacggtgatgtttgcagacagaaaaagtaaactg

SEQ ID NO: 883391 - DNA, 99 bp, Homo sapiens
gagcgactttcattagaaggagagcgacagcccaagtcaccagtgctggcctacatgcagttgctggaggactactcggagccgcagccctctatgttc

SEQ ID NO: 883392 - DNA, 99 bp, Homo sapiens
gaaaccagagccagtcgggccaagagaagaggcggtggaggacacgacgcgcttaaaggggacttcagtactagtgctaataacatccagattgataaa

SEQ ID NO: 883393 - DNA, 99 bp, Homo sapiens
ggacctagactgtgacaacgaccacgtctccaaaatgagtcgcatcttcaacccccatctggcagctttggaagaagtagaaggtgatgtggcagaatt

SEQ ID NO: 883394 - DNA, 99 bp, Homo sapiens
gagcgtcaacagcagcaccatggagttcagatcattcaggatcaacaactccatcatctggtcaagaaaccttgtctttagctgtgggttcttcctcag

SEQ ID NO: 883395 - DNA, 99 bp, Homo sapiens
acggactatgggcgaatagctctgaccacccggcgaagacgactgcaagaacattgccaacatcatgaagacactcgcctatcgaggcttcatcttcaa

SEQ ID NO: 883396 - DNA, 98 bp, Homo sapiens
tggaaaatttcagtttgaaactgaagttcccgatgcgtacaacatggtgggatgggcgtgttttgggcgtgctagaggtgtcacgctccattggggac

SEQ ID NO: 883397 - DNA, 76 bp, Homo sapiens
cagccctcaccctgacagatacggagcacgaaaacaagtccgacagtgagaatgacccaacatgagtgaagtttcc

SEQ ID NO: 883398 - DNA, 99 bp, Homo sapiens
ttccaggtgtcccagaaacccaggaaatcgagactcatgactcccagagaggatggcatctagaagctcttcacagaggtcctccaggatcaaggggac

SEQ ID NO: 883399 - DNA, 99 bp, Homo sapiens
gatattcctcatgacattgctgtctggttgtgtgatagctgagctttttacagaaggtgtaccattatttgatctctctcaacttttggcttatagaaa

SEQ ID NO: 883400 - DNA, 99 bp, Homo sapiens
ctgcttttggacttcatgctagatgtccttctgatgccttatgggagcttcaggatggttcgtactaagacatggaccctgaagaagcactttgttggc

SEQ ID NO: 883401 - DNA, 99 bp, Homo sapiens
tcagggggaaaggatgcaaattctccagaatttcaagcacaaccccaaaattaacaccatcttcatatccaaggttttgctgttactgctcagtgtagt

SEQ ID NO: 883402 - DNA, 75 bp, Homo sapiens
gtaatcccagctctttgggaggccaaggaatttatctcactaatatcttgaaaacagaagaaggcaaccctgagg

SEQ ID NO: 883403 - DNA, 76 bp, Homo sapiens
actcctacgaggacaaaagcaacgacttcgtatggaaaatatgagagccacacccgtgttcacacaggtgagaagc

SEQ ID NO: 883404 - DNA, 75 bp, Homo sapiens
gctcatctcccgactcaagcaggctttccttaaagtttcccatgtctcaatggactcctgaatataacgagctct

SEQ ID NO: 883405 - DNA, 98 bp, Homo sapiens
agaacccggccctcaccgccctcaccacccctatccagacggctgcccttcaagtaccagtgccactgcagaagcgggcagtgccctccatgaggtgc

SEQ ID NO: 883406 - DNA, 76 bp, Homo sapiens
cctccaggcccagaacggagccgccttggcctcggggtctccctacaccaacggttcgttaccgtgaacgcatcac

SEQ ID NO: 883407 - DNA, 99 bp, Homo sapiens
gcagcgatgatcttccccagcagcagtggcaaccccgggggcagcagcaactgccggacgccctatcgcaagcagaagctgcagttcatcatctgctgt

SEQ ID NO: 883408 - DNA, 99 bp, Homo sapiens
tcgattttcaaatcttgtattacaggctcttctcgttttactgaaaaaggcacctcctcagagctatcagcttcccagtttgcacaattcatcaagaaa

SEQ ID NO: 883409 - DNA, 99 bp, Homo sapiens
atgattctgtacagcctgtgaggaggagcgaagaaagctaccgtgaatttactgggtgaagaaaagaagagcacctaaaccagactggatggaaacttc

SEQ ID NO: 883410 - DNA, 99 bp, Homo sapiens
acgaccacatttgtcatgatgacagtgacaaggtgaccatagccgatgactactcagatccctttgatgccaagaatgatctcaagagcaaagcaggaa

SEQ ID NO: 883411 - DNA, 99 bp, Homo sapiens
taactaccgagtcttcggcgggctcgcgagcccggccgcggcctgctggtttcagttctgggattaccgccagcctcggaaatacctcaatattcttcc

SEQ ID NO: 883412 - DNA, 99 bp, Homo sapiens
aattagattgctgttcctccttagaccacccgacagaccagaaactcatcccagagttcattaagaagtcacagataaatttccatggtaaaaagctga

SEQ ID NO: 883413 - DNA, 98 bp, Homo sapiens
ggaaatgtccaccactgtttctcatcatcaccaaacgctttaccaacagggacgcttatgtcaactgggcagtgaattttgtgaattggaagtttttg

SEQ ID NO: 883414 - DNA, 99 bp, Homo sapiens
gggtgcactcataggctcgtctggtgctatcctgtcatacatcatgtgtgtggaatcctatgaggatggttgtgaggattatcctactctatcagaata

SEQ ID NO: 883415 - DNA, 73 bp, Homo sapiens
ttgttgacatgcatgcagctgcagacatcttcaaacactacatgaagtgctgaagctgctgaaagatggcaga

SEQ ID NO: 883416 - DNA, 99 bp, Homo sapiens
gaggaggaggaggtgcaatccttcggttacaagcggtttgttactgtaaaatggggaaaggagaaatttgaaggtgtagaattgaatacagatgaacct

SEQ ID NO: 883417 - DNA, 100 bp, Homo sapiens
ggattttgcacaaaaccacaggaaagtcccggagctccatcccttgaaatggatgcagtcagaactgaatgttgaagaagtggtaaatgacaggagctgg

SEQ ID NO: 883418 - DNA, 98 bp, Homo sapiens
aacattccacagctgctgaagaaaagactagcccgagtcagatttggagcaagaggtggtggtggccttcccccgaagaaatttggtaatcctgggga

SEQ ID NO: 883419 - DNA, 76 bp, Homo sapiens
tccggacaagaggactgaagcagatggcaactctgatcccaactctggactggaacttccttttatgatgatgccc

SEQ ID NO: 883420 - DNA, 98 bp, Homo sapiens
ttgaagccgcctctgtattacttaccagctcttggagataaaatcgtgagggatattcgccctggagctgcctttgagcccacatatatttacagact

SEQ ID NO: 883421 - DNA, 99 bp, Homo sapiens
gcctgggcaatttgcaacttcacatacagagaaactaccaccaagagtggggttgtacatcagaattttgaagaacaaatgcaaggcatgaagacccag

SEQ ID NO: 883422 - DNA, 98 bp, Homo sapiens
agtgagagaatggaggtgaggtcagggactcctgccttgcctctgccatcacttccagtgatgcctattcctaagagagaaaaggaacagttccgtaa

SEQ ID NO: 883423 - DNA, 98 bp, Homo sapiens
gagaccgctactcacccgggtaacgagcagggttgaagccatccttgtcaatatatttggtggtatcgtcaactgtgccatcattgccaatgggatca

SEQ ID NO: 883424 - DNA, 98 bp, Homo sapiens
aagtgagagtcattgatcccaggaaacaagagattgttgctaatgaagctgataggaccttgatatatataactctctacatttctgaatgtctgaag

SEQ ID NO: 883425 - DNA, 99 bp, Homo sapiens
gatgttattcgattactgctggcttcaggagcaaaagtcaaccagccaaggcagggccagttctgtgactattgcaattctgaagaccccaggaaagca

SEQ ID NO: 883426 - DNA, 99 bp, Homo sapiens
ccaggctgatggagagctgaacattactcttccagaagagatgatacaccccctgaagactccattcctttggtctttccagaattagaccagcagcta

SEQ ID NO: 883427 - DNA, 98 bp, Homo sapiens
acttggccgcgaagtggcccgagaccccgctgctgctggaggcaagacctgagaagatggctaagctcccagtgattttaggcaatctagacattaca

SEQ ID NO: 883428 - DNA, 99 bp, Homo sapiens
gaggatggcttgaacagacagattctgtcttaactaataagattggaactgtattagctattcctacttgtacggactttgaagtgattcagtttcctc

SEQ ID NO: 883429 - DNA, 99 bp, Homo sapiens
gacaactgcaagggggaagtagagagataacaaaagctgctcagagtctcaatgaacttgacgataattgctactgccatttcatatggagccaacctg

SEQ ID NO: 883430 - DNA, 99 bp, Homo sapiens
agaccagaggcttgggttttgatgaaatccggcaacagcagcagaaaattatccaaggagggttggagcccaggcgtttggtacggggcgtgaaaggca

SEQ ID NO: 883431 - DNA, 99 bp, Homo sapiens
tgaccttgaacgattccgctctgcggcgggtgtccctaaactagcagtttagggtgtcagaatttcagccaatgtttggaatccaagctagaaaacagt

SEQ ID NO: 883432 - DNA, 72 bp, Homo sapiens
caatgagcacatgaccagcttagcttctgtcctaaaggtagagttggctttgtgggacacagctgggcagga

SEQ ID NO: 883433 - DNA, 98 bp, Homo sapiens
tttttcaccctcacgctgatgaacttgtacttcacgcaggggtagacttaaagtctgaaacagaaggtttcagtgcatcaagcagtccaaatgactta

SEQ ID NO: 883434 - DNA, 99 bp, Homo sapiens
ccctgggcagggcacgaggcctctgagcctagagagtgaagaccattactgggacttccacccccaccacgtgcacagcgagttcgagagcttcgccga

SEQ ID NO: 883435 - DNA, 99 bp, Homo sapiens
gctccggggtgtgtggacgccgctttgttgcctgagctgttttcactcattagctcctgaggtaaacaaattgaaaaaatgagcgaactggaacagttg

SEQ ID NO: 883436 - DNA, 98 bp, Homo sapiens
gctgatattgatattattacagcttcatatgcaccagaaggagatgaagtctgctttacaagaacttgaagaattgaaacaaattgttcccaaagaat

SEQ ID NO: 883437 - DNA, 75 bp, Homo sapiens
cgggcggccggtcgggcggggcggcggcgctgacaggtttctgggtggagcggacccctgtgcacgaggcagccc

SEQ ID NO: 883438 - DNA, 98 bp, Homo sapiens
ccggctagaggaagaggcgttgcggcgaaaggaacggctgaaggccctacgggagaaaaccgggcgcaagccatgaagctcatgactgctctggtgaa

SEQ ID NO: 883439 - DNA, 98 bp, Homo sapiens
gagacagttcttcctctttagatagttctgtgacttcatcttctgatataaaagaccagtgtcttaagtaccagatgccttcaattaagttgcagagt

SEQ ID NO: 883440 - DNA, 98 bp, Homo sapiens
gtgcttcagcgggccaggaagcgcatccaggaggatccatcagttacacaagtgacaagaaatgttccaccaggacttgatgaatataatccattctc

SEQ ID NO: 883441 - DNA, 75 bp, Homo sapiens
atttgagatgctgttgcacaaaattccccttatttgccaggtcagaagaggccaagtgatggaaatagtggatta

SEQ ID NO: 883442 - DNA, 100 bp, Homo sapiens
gccgcgggctgcggacgctcggtcccgcgctgcgcatccccgcggacgccacagcgctgtccgagcctccgtactgggtgcaatgaaagctccacgcagg

SEQ ID NO: 883443 - DNA, 99 bp, Homo sapiens
attgagtctacctttcacatgtatgtccagcctgtagtccatccacagcttaccccattctgtacagagctcggattgggaaaatgaaacggaggaagc

SEQ ID NO: 883444 - DNA, 98 bp, Homo sapiens
gggaggccgaggactcggagttcacctgcaggaagaagaggaggggtcagaagacgatagcaatgtgaagccagacttcatggtcactctgaaaaccg

SEQ ID NO: 883445 - DNA, 98 bp, Homo sapiens
tgtagtccacatggagctctcagcataccgtgcaacaggcaaagggcgttgtgaatacagctgtgtctgcagcagtccaagctgttcggggcagagga

SEQ ID NO: 883446 - DNA, 100 bp, Homo sapiens
gctggagcagtccctctctgtccgggcgctgcaggagatgctggctaacaccgtggagaaatcagaagggagtctgatcactgcgcatgagcagttcaag

SEQ ID NO: 883447 - DNA, 98 bp, Homo sapiens
gcagcccaggcgcgggggcgacgacaggacctcagcagccatgtcgaagccccatagtgaagccgggactgccttcattcagacccagcagctgcacg

SEQ ID NO: 883448 - DNA, 99 bp, Homo sapiens
gatgtgtgcaataatgaatcattagtatcggacacagaaacgcaacaagaatgggtgaatcagcaaagggaagatattgaaaggcaaaggaaacttcta

SEQ ID NO: 883449 - DNA, 75 bp, Homo sapiens
gaaaaaataagaagtggctccaaacatggccaaacagcctttgatgtagcagatgaagacattttaggatattta

SEQ ID NO: 883450 - DNA, 76 bp, Homo sapiens
aagaagttgcgaaggatccccaacggggaggccaacgtgaagaatggtccatgctgtggacggcaccgccgagaac

SEQ ID NO: 883451 - DNA, 98 bp, Homo sapiens
tggagagctcgaattccagaatgatgaaattgtgttccacctgaattccttccatgcttttcagcgactgaaccatttgggtggcctggaagagcctg

SEQ ID NO: 883452 - DNA, 100 bp, Homo sapiens
agaatgcgagtattcttttaaaggaacttgatctggaaaaggtttattcttcagtccaaggaagcaattcacagtcagctgttagagaagcagaaaatag

SEQ ID NO: 883453 - DNA, 98 bp, Homo sapiens
gagcgagctgagtggttgtgtggtcgcgtctcggaaaccggtagcgcttgcagcatgatggagcagctatcagatgaagaaattgatcatggtgctga

SEQ ID NO: 883454 - DNA, 76 bp, Homo sapiens
aagtgtccagtggatttttaatcacatgagagacctcatggcctatgacagaagagggagacctggagaccgttac

SEQ ID NO: 883455 - DNA, 99 bp, Homo sapiens
gtgacctcatcactgtggtagatgcagttacattttctccaaaagctgtgaccaaggtgagaagccttataagtgctcatgggagggatgtgagtggcg

SEQ ID NO: 883456 - DNA, 99 bp, Homo sapiens
tcttgtcactttaattacttgagaatttataatggaattggagtcagcagaactgaaatagatcaacctctagaatcccgtagactctgcaacaagcca

SEQ ID NO: 883457 - DNA, 100 bp, Homo sapiens
cccaggcatgcagtgggacacagagcacgtggccagagtcctccttcagcacatagaagtgaatggcatcaatctggtatcctgcaccccatgtaacata

SEQ ID NO: 883458 - DNA, 100 bp, Homo sapiens
ctcgaattccagaatgatgaaattgtagtttgccagatccggcccggtgcctgggttccaggaggacacgctgcagttggccttcatcgacttgagacaa

SEQ ID NO: 883459 - DNA, 98 bp, Homo sapiens
gcgcccagaggcgagccctggtggaggaagaggcattgatgacggggagccttcctggctttgtcgacgtcatcaggaacctcaattctcctgcactg

SEQ ID NO: 883460 - DNA, 99 bp, Homo sapiens
tacagatgattttgactttgctggctcatttcaagaaatgctttgtggtctacagccacaccaccccaaatgtgcctgatcttgtctgatcttggaagc

SEQ ID NO: 883461 - DNA, 99 bp, Homo sapiens
accaatacttctgagggccacctgtatgtggtgtccaacgctggctgctgggagaaagatttggccctcatgcaggacacacacctcctctacgtactg

SEQ ID NO: 883462 - DNA, 98 bp, Homo sapiens
aagcggtttcaaacggcttagagcaggccgcttggttctgacccagctgagttttaacagtgtatgccagggaacacacattctctttcgagaattca

SEQ ID NO: 883463 - DNA, 75 bp, Homo sapiens
cccgtttcctatagatgagaaaccatacaagctgtggtgagactgctgctcctcgggccattttgaccggccatg

SEQ ID NO: 883464 - DNA, 98 bp, Homo sapiens
aaaactcgtgaggggaacgtgcgcgtgagtcgtgagctggcaggacacacagccacagacccctttgcttctgtttttgggaatgaatcatttggagg

SEQ ID NO: 883465 - DNA, 99 bp, Homo sapiens
ttccattacagaaaccttcttcttggtgaacacgatgtccctttaacatgtattgagcaaattgtcacaggtccagatgtgaaaaagctttgcatcctt

SEQ ID NO: 883466 - DNA, 98 bp, Homo sapiens
aagaattcctcactaatgagctctccagaaaattgatgcaggtgaagatgcaatgaccggggacacagacaaatatcttgggccacaggaccttaagg

SEQ ID NO: 883467 - DNA, 99 bp, Homo sapiens
aacttgtgagcctgcggtgaaaggagaagagatcaactttgggaaacttatcacaaagccttcagaaggaacaactttaagggtagaagatcttgtaaa

SEQ ID NO: 883468 - DNA, 76 bp, Homo sapiens
gtgcgggccccgctccgcttcgaatgggctcagtagatgaaggcgtttctgagggcttgcctacacttcaaagcac

SEQ ID NO: 883469 - DNA, 98 bp, Homo sapiens
cggcgggagcggcggcaagaaaaatgccagccagaagaggcgttcgctgcgcgtgcacattccggttattcagcttctcaaggctggaaaagcgaagg

SEQ ID NO: 883470 - DNA, 98 bp, Homo sapiens
cagcttccgccaggcggtgatgaagaatccccccgaaaggaccccccagcctcactaagcagtcttttgatcacacctttcccatctccaagctcctc

SEQ ID NO: 883471 - DNA, 100 bp, Homo sapiens
aatccagagctggtgagagcggtgactttggagggaagtcgagataacatgagtattgtactagtttgcttttcaaatgctcccaaggtctcagatgaag

SEQ ID NO: 883472 - DNA, 98 bp, Homo sapiens
aagatcaaggtgcctgcatctggcgtctagtgtggaccctattcctggtttgcaggagcgagttcagaagacctttcctcacccaattgataaatggg

SEQ ID NO: 883473 - DNA, 99 bp, Homo sapiens
agcgacgccgccgtgtgcccaacggtcggtgtccccggctgaggcagcgcggccgcagcagcccttatttgactacagtcattccttatgagaaaaaaa

SEQ ID NO: 883474 - DNA, 76 bp, Homo sapiens
atttcaatatcagcaaaaacctgcggtcattacacatgctattggtgctatacttggtagatcagaaactcaggag

SEQ ID NO: 883475 - DNA, 100 bp, Homo sapiens
gacaaactcttctgaaaggtgggcaacctagaaagccagttgatgccacttgctattggagttgtgggtatgatctcgtgaaatcttgagagaaactgaa

SEQ ID NO: 883476 - DNA, 98 bp, Homo sapiens
tctgtccgcccccttggccactgatcccccgaagagcttctgtcgccgctctagggtctgctgagaacagacccagtccctgaggaaggagaagatgt

SEQ ID NO: 883477 - DNA, 100 bp, Homo sapiens
gatctcagtttattaaaggaaattttgaagaggcctgtggatcctataaggtatgcaccaggacacaacagggtatgcctgccttctcattcagccagcc

SEQ ID NO: 883478 - DNA, 98 bp, Homo sapiens
aatgctgagcagcttcctgggagggaacatcttaatgaacctgacattcaacgtctgcagttggatctgcagaaaatggagcttctagaaagtaagat

SEQ ID NO: 883479 - DNA, 98 bp, Homo sapiens
cctcccaccatggctctgaagagaatccacaagagaatcacattttggaagatgtgaacaaatgtgtcattgctctccaagagaaggatgtggatggc

SEQ ID NO: 883480 - DNA, 99 bp, Homo sapiens
gccataaggagtttgattctacaaaagaaaccaaacatcagaaatacatccagcatggctggagcttatggaaaagtatttctagttcgtaaaataagt

SEQ ID NO: 883481 - DNA, 99 bp, Homo sapiens
ccgatacttgacctacgcaagagacaatgtcatgtgattcagcctaatatctcaaatcctgctgcatcacagaagctggaagttctgatgttccactga

SEQ ID NO: 883482 - DNA, 99 bp, Homo sapiens
aagatgaagacatggatgtcaaatactttgcacaggaagctataagtggtgatgggcagaatctgtttacgaaagacgtgacagtgatcgagggagagg

SEQ ID NO: 883483 - DNA, 98 bp, Homo sapiens
gagaagctaaatgccctccaacttagtgatgaagagatgagtttgtttacagctgttgtcctggtatctgcagaattcagaaggagctggcggacatc

SEQ ID NO: 883484 - DNA, 98 bp, Homo sapiens
ggcgacaggccgctgacggccggaaggaaaatggggctttgttatgcacctaaagccatattggaagctccagaagaaagagcaccccccggaagtca

SEQ ID NO: 883485 - DNA, 99 bp, Homo sapiens
atcattctgtcttttaattggggtgtgcattcaagacaaacatcatatctgaactaagtaaatggagacttaattttattgactggcaccgaatggaaa

SEQ ID NO: 883486 - DNA, 99 bp, Homo sapiens
ataagctttgcaacagaattacagagtatgatcctactgaattagtaagtaaggagagagaagagaaggtaaaagaaacacaggaagacaaattagaag

SEQ ID NO: 883487 - DNA, 98 bp, Homo sapiens
gctgaacaaaaagagatgcagcttctgcctcctccagcctctgttgagttgagaatcagcaggatggagatggacacatggatcatttactgccaggc

SEQ ID NO: 883488 - DNA, 75 bp, Homo sapiens
agaaacctggatctttgctagaaagagaggagaataagccaatgcatggcaagcactaaatcttagatcctgaag

SEQ ID NO: 883489 - DNA, 99 bp, Homo sapiens
tgaggttgctcctcccggggcccttcccgggcaaggtagaggaagaagaacccactggatacattcgattcgaaaaatttcttccggtgatgacagaaa

SEQ ID NO: 883490 - DNA, 99 bp, Homo sapiens
aagatcgagttcatcgggcagatcgcttcggggagttttgcctggctcacctgttactgaagaggaaccctgtcatgttcttccaacacttcattgaat

SEQ ID NO: 883491 - DNA, 76 bp, Homo sapiens
actatcccaagactgctggcaacagacttaattcagtgcacaaatgagatgaatgtgaacatcccacagttggcag

SEQ ID NO: 883492 - DNA, 100 bp, Homo sapiens
cacatccaggttgttttgaagcaaagtccaagcattgtatcacttcatctgcaaatatttcaataagtacccaaaagaaatgtgttacggatgagtgttt

SEQ ID NO: 883493 - DNA, 98 bp, Homo sapiens
cttaacatcgtttggatcagctccttcatcagaggaccatgcagaggagggcagggctagcatttacaaatcagtcttttccaactcttccaaagaga

SEQ ID NO: 883494 - DNA, 98 bp, Homo sapiens
ggaccccgaggatcaggaaaaactatggtgctttgtaacagagccagactggtttcctatctcccaggattttgctctttagttaaaagggttgtcaa

SEQ ID NO: 883495 - DNA, 99 bp, Homo sapiens
aacgccccggtggagaagctgagagcaatggtggaacaaagcggcaaaagatatcccatcaaaattatatagcctatcaaaagcaagttattcgccgaa

SEQ ID NO: 883496 - DNA, 98 bp, Homo sapiens
tgtgactggattcacgggtagagattggcttcgggctgagctagcagtgagcaccttttggcccaatgaatatcaggattgctttgtagcggaaatgg

SEQ ID NO: 883497 - DNA, 76 bp, Homo sapiens
ggaatttctgcaacccatagtcaacgattacatggccacaagggcagccattactcagcactgcactgaccttggg

SEQ ID NO: 883498 - DNA, 99 bp, Homo sapiens
ccaaatgggtcgcagtcgcagccgctctccacggagggaatatggacggagccttgaagatgacattcgctctgacacatcgttcatgttccagcgagt

SEQ ID NO: 883499 - DNA, 75 bp, Homo sapiens
cgacgattgcggagctgaagttcaggcagcgggagcgaggaggggttcagatgactgtttagtaaaaatttgggc

SEQ ID NO: 883500 - DNA, 99 bp, Homo sapiens
aaagaagtagccttagtaataaccctcttttccagtataagtatttggctcttaatatgcattatgtagtcttcccaagggattgttgaagaaacttct

SEQ ID NO: 883501 - DNA, 99 bp, Homo sapiens
tctcaccgatcttcttgtgtcaccatgctattatgcatagaaagtgacagctatattgtgcgtgtcaaggctgtggttatgaccagagatgactccagc

SEQ ID NO: 883502 - DNA, 99 bp, Homo sapiens
cgtgaccaccatagtcttcatctacgactgcctcatgggcttccctgtgctggtgggtgacatcaccatcctggtgaacaatgccgccgtggtccatgg

SEQ ID NO: 883503 - DNA, 99 bp, Homo sapiens
gcggcccagctctctctgacacagctccagggcccacaacggcagtgtcctacatgtcggtgaaatgtgtggatgcccgtaagaaccatcacaagacaa

SEQ ID NO: 883504 - DNA, 100 bp, Homo sapiens
aaattgcagccagggatattgagaaacttctgagcaacagatctaaagccctggtgactatgtcttcagcagtggtgcagttatatgcagcagatcggaa

SEQ ID NO: 883505 - DNA, 74 bp, Homo sapiens
cctaaagaaatagcaaatctccttggatttcctccagagttcggtgggaaggatacgagcaagataaagcagcg

SEQ ID NO: 883506 - DNA, 76 bp, Homo sapiens
atactctcgctcacgcagcaggagcaggggacgaagagctgtacagccatcagaattagttggaagtgtgtggaca

SEQ ID NO: 883507 - DNA, 98 bp, Homo sapiens
ttgaggcaagaagcagaacaactgcggaatcagattcaggagcagcatggacctgtcagcaactaaggaacaaaagtaatgaagatttacacaaactt

SEQ ID NO: 883508 - DNA, 99 bp, Homo sapiens
tgtaatgcaacgttgtgatctggaggcacatctcaaaaacaggtcaccagaaagacctacaggggatcttagagaaagaatgaagaacaagcgccaaga

SEQ ID NO: 883509 - DNA, 99 bp, Homo sapiens
aagcttgttacataatgattggactcacaattatcgcctgctttgctgtgatagtgtcagccaaaagggtttcaccttgcttaaatgtcctgtcacgac

SEQ ID NO: 883510 - DNA, 99 bp, Homo sapiens
accggcagaacacagcagggcggaggaaagtgcaggatgtggaaccatcttcacctgctgcccttgccggcctgcgcccctacacagactatgtggttg

SEQ ID NO: 883511 - DNA, 99 bp, Homo sapiens
cgtgtcaccatccaggaactcacagatggcagttaaacagggaaaccaactgcagatgcaagtccacgaagggcaccatgtcgttgatgaagccccacc

SEQ ID NO: 883512 - DNA, 76 bp, Homo sapiens
ctccccagccatgcttcctgtacggcctgcagaactgtcatgcagaaggcttttgtatgatgtgtacaatgcaagc

SEQ ID NO: 883513 - DNA, 100 bp, Homo sapiens
tagcaccgcagttggcatcttttccgtcctgcttgtgtttacttctgccattgccaacatgacctgtgaccgcatcaagcagtcagcagctggcaccaag

SEQ ID NO: 883514 - DNA, 99 bp, Homo sapiens
gcctcttctgcaagtggggcattcacacagattggaccagaccctgaattcttctagctcctccaatcccattttatcccatggaaccactaaaaacaa

SEQ ID NO: 883515 - DNA, 99 bp, Homo sapiens
gcctacctcttcctctggcccgaagccttcctttatcgctttcagactctggctgccctaacaagaaattcaataaatctgcttccaaaccatcttgca

SEQ ID NO: 883516 - DNA, 99 bp, Homo sapiens
taccttctttgcagactttggttggtggaggctgtggcaatggaacaggcttgagaaacaggtgtttaatgaacgctgccgaattcacttcaagcctcc

SEQ ID NO: 883517 - DNA, 98 bp, Homo sapiens
tccctcaatcaagtcagtgactggatcatctcctaaggtttcacctgctttgcatcagcaatgaggttgaaagaatgttggaaaggcatgaacgcttt

SEQ ID NO: 883518 - DNA, 99 bp, Homo sapiens
ggcagcccaccgccgccttcttggcgcgaccccaacccagccccattccatctctcttatgcagagaaagatttgttggagagagagccaagaggagaa

SEQ ID NO: 883519 - DNA, 100 bp, Homo sapiens
tggcaagtcttccgttctgaccaacgaaaagatggattctcagcaagttacagaagtatctttgacaactcttgtgaactttgtggacattacccagaag

SEQ ID NO: 883520 - DNA, 99 bp, Homo sapiens
gtaagcgcacgtttaaacatctcaaggaatcagtgtcattcaaggacgtaactgtagacttcagtagggatgagtggcaacaattagaccttgctcaga

SEQ ID NO: 883521 - DNA, 100 bp, Homo sapiens
ggatagagaagagttgtccgtaatgcctttcatttctgctggatttacaagggatacccagagccagaggtgacctggtacaaggatgatacggagctgg

SEQ ID NO: 883522 - DNA, 98 bp, Homo sapiens
gataaatcagtgctgctttctttaggacgaaagggctgatagttcaggaccattcagaccccatgttcagttcatatgcctataagtcccactaccta

SEQ ID NO: 883523 - DNA, 76 bp, Homo sapiens
caagtaaaacggtagctgctaaaaagggaggtaactgagttctatgttcaaaatgaaaattcagtggacaagtggg

SEQ ID NO: 883524 - DNA, 98 bp, Homo sapiens
ttgaggcccttcttgtgtatctggagaaaatagagggacacttgacattcagggacgtggccatagaattctctcaggaggagtggaaatgcctggac

SEQ ID NO: 883525 - DNA, 99 bp, Homo sapiens
taaaggtactgagaaaagagaatccccttcaccagcaccgaagcctagaaaagtagagttatctgaatcggattatgctgctgcccagttacgccagta

SEQ ID NO: 883526 - DNA, 100 bp, Homo sapiens
tacgaggcaacaatttcatatctgagacactctggcaactccattaacctgtgcactgcaaaagaaattgctgatcgggatggactatttgggttctcgg

SEQ ID NO: 883527 - DNA, 99 bp, Homo sapiens
ttcctgtcatggttccccttctactacatgctgaagatggaatcttgctctcttgctcagactggagtgcagtggcatgaccttggctcactgcaacct

SEQ ID NO: 883528 - DNA, 99 bp, Homo sapiens
tgaggagcgctacgggaacatcaccttgcccatgtctcacgcggggcatggtgctgatgtgaaatgtgtagactggcatccaaccaaagggttagttgt

SEQ ID NO: 883529 - DNA, 75 bp, Homo sapiens
tcctttcctgctagaactttcagaatctcaggcgggtgaggcagattattgccagagggctgcttgatatcttcc

SEQ ID NO: 883530 - DNA, 76 bp, Homo sapiens
ccgaacgacgcgggcgagcggggctttggacgccggtggagacgcaggcgaggaaggatgccaattctgcgcttct

SEQ ID NO: 883531 - DNA, 99 bp, Homo sapiens
gaacattcaacgaccaaccagcctccccctgaagattctgccgctgattgctatcacttctgcagaatccagtggaacccattaaaagagccagtaaat

SEQ ID NO: 883532 - DNA, 99 bp, Homo sapiens
caatgtactggatcgaaatgtccatgagaaaaagcttggagataaagttgctttttactgaagattaagattgcggccctgcgcatgtatactagctgt

SEQ ID NO: 883533 - DNA, 98 bp, Homo sapiens
attatcaggatttgaaaacccagtatcagaatctaccactttgttctcacaccattttgctggtacagcctaccaagaggccagaaggcagaacttat

SEQ ID NO: 883534 - DNA, 75 bp, Homo sapiens
taatgcagggcttggcacgatacgtgttccagtcagatatatgtaatcgacagtgcagacagaaaaagatttgaa

SEQ ID NO: 883535 - DNA, 98 bp, Homo sapiens
ggctggaggggctgctgctgggaacacctggagtctccgcgggcagatacgatgaatggattaaagcagataaaatagtaagacctgctgataaaaat

SEQ ID NO: 883536 - DNA, 98 bp, Homo sapiens
agggcgccattccggccgccatcgcgacggccaaaaggagcggcgcggtcttcgtggtgttcgtggcaggtatgggctacgtgagttcgtggtgattg

SEQ ID NO: 883537 - DNA, 76 bp, Homo sapiens
gggatcttcaaccacctcgagcggctgctggacgaagtgtttgtcaggttcaactccagccatggtttcccagtgg

SEQ ID NO: 883538 - DNA, 76 bp, Homo sapiens
gtgacaaggccagctatgctgtgagcgagaccatccccaagattctgaaggaagatttccattaggtaatttgttt

SEQ ID NO: 883539 - DNA, 98 bp, Homo sapiens
tcgggtaccgggagcgaacgaggaggttctggctcagggcccgatgatgcacaacaaaaaatagaacctcatcacacagcagtgcttggagaaggtga

SEQ ID NO: 883540 - DNA, 99 bp, Homo sapiens
tatccttgctgtttcatttgctccacttgtgcaaccaagtaagaatgataatggcaaaccagattctgtgggactccagcccccaattttgtgagtgtc

SEQ ID NO: 883541 - DNA, 99 bp, Homo sapiens
tataggctgaggctacctgtgaacagtacgcagtgaatgttttttcaatggttccagcaggtcaacacgggagaaggaacctgttcaaaaacacaaaag

SEQ ID NO: 883542 - DNA, 76 bp, Homo sapiens
gctgcctggcccaggcgcacacggaagtgctccagggcccacaacggcagtgtcctacatgtcggtgaaatgtgtg

SEQ ID NO: 883543 - DNA, 71 bp, Homo sapiens
ggtgtaccaggcgaagctggccgagcaggctgagcgatacgacggccgccctggacttcgtggtggaggag

SEQ ID NO: 883544 - DNA, 98 bp, Homo sapiens
cccggtttccctcggcgtgctactgtgcgctcgatccagcaccatggggaagcgggacaatcgggtgcactggcagcagcgacccctactgcatcgtg

SEQ ID NO: 883545 - DNA, 99 bp, Homo sapiens
aaaggctattacatcagagacagtggcaacaattcagacgaagaatgctgttcaagctttgattgataagcaccaaagaataccaggaaacattatgag

SEQ ID NO: 883546 - DNA, 74 bp, Homo sapiens
agaggccctgcggaggcggcggtgcagcgctccgactgcttctcggaggagtgccgctctgtgatccaggaaca

SEQ ID NO: 883547 - DNA, 75 bp, Homo sapiens
gtcggcccttgccttggcagagctgagattatctcaactttggtctcctgggaccactcgttgctgacagtcaga

SEQ ID NO: 883548 - DNA, 99 bp, Homo sapiens
ttggatattgataaagtaacacgccctcaagagctggatttgacacatcaagggcagccaattactgaggttacctacctgggcaaagtctccaccact

SEQ ID NO: 883549 - DNA, 100 bp, Homo sapiens
caaggccaaggaccccttcgctcacctgcccaagagggccatcactgtgcatgtccccatgccctcagcaggagtcgtggacatccccattgtggagaag

SEQ ID NO: 883550 - DNA, 76 bp, Homo sapiens
gtcagaattgcaagggaaattggaaagcgtctctagcagctgatatccccagacttggatatagttcctcatccca

SEQ ID NO: 883551 - DNA, 98 bp, Homo sapiens
aagacattgtgaccatttcgcaggcaacccccagttcagtgtccagaggcacagcccccaggatatatgattggatgcctgaacaaccaaatatattc

SEQ ID NO: 883552 - DNA, 99 bp, Homo sapiens
catcagtgtgcagaggccgttgcttttgaccagaatgctttggttaaacgaatcaaagagagagaaatctcatcatctgtgcagccttcttaaagcaaa

SEQ ID NO: 883553 - DNA, 99 bp, Homo sapiens
cctggaagagatttgtgcgtgtggctgaattgcccagcatgccccaggatttgtcagaggccctgaaggaggccaccaaggaggtgcacacccaggcag

SEQ ID NO: 883554 - DNA, 75 bp, Homo sapiens
tagtggctatcgacttgcttgcaagttacaaaagcaggttggtcactggaagatgttgacatatttgaaatcaat

SEQ ID NO: 883555 - DNA, 98 bp, Homo sapiens
agctctcaaactgaaaccaaatactaaaatcatgatgatgggaactcgtgaggagagcttgaggtttgtgaagaaaattcaacctcagcaacttcaga

SEQ ID NO: 883556 - DNA, 98 bp, Homo sapiens
ccggagtcagcagggcgcaaaagcgccgtgtgctggaattgatgttcgtctgtgtgatgttggtgaggccatccaagaagttatggagtcctatgaag

SEQ ID NO: 883557 - DNA, 99 bp, Homo sapiens
acaacaacagcagcagtaccaccaccaccacgcccagcagtcagctgcagcctctcccaacctgactgcttcacagggatcatagacggtatttctatg

SEQ ID NO: 883558 - DNA, 99 bp, Homo sapiens
tggacaaaccttcagatcgtggcaagcgagcccggggtagagggactttcagttaccttgatgatgtcccatttaagacaggagacaaattcaaaacac

SEQ ID NO: 883559 - DNA, 99 bp, Homo sapiens
gggctgggtagagatcaacagcagttcaagagagactagcttgcaaaattttcctcatattgaggtggttcggaaaaaagaggagagaagaaaactgct

SEQ ID NO: 883560 - DNA, 73 bp, Homo sapiens
gtaaccccttccgggagcctagatcctgtgctttactctgaagactctgcaaattgggaatcgtgaaattcat

SEQ ID NO: 883561 - DNA, 98 bp, Homo sapiens
atctatgttaatggatacacagcaacaggaacaagatcctaccaacctctacatttctaatttgccactctccatggatgagcaagaactagaaaata

SEQ ID NO: 883562 - DNA, 75 bp, Homo sapiens
agactagcagatctctttgggtggtctcagcttatctacaatcatatcacagctttaccgccagcacctgttcag

SEQ ID NO: 883563 - DNA, 98 bp, Homo sapiens
gagggaaaagcgaggcaaggcaggcgggaactctaactccttgccactcaagaaatgtcctccctttcagaatatgccttccgcatgtctcgtctcag

SEQ ID NO: 883564 - DNA, 99 bp, Homo sapiens
cgtgggaacgcttattcaacggcaaaaggggccccaaggaccaaaagggcagaaaggtgagccttatgcactgcctaaagaggagcgcgacagatatcg

SEQ ID NO: 883565 - DNA, 100 bp, Homo sapiens
gaagaagctagatgaccagtctgaagatgaggcacttgaattagaggggcctcttatcactcctggatcagattccaatggtattacatctttttgatac

SEQ ID NO: 883566 - DNA, 76 bp, Homo sapiens
gcatttatcaccttctgtggaaaggaagctgcacaggaagccgtgaaactggatgatgactttgagttcactggca

SEQ ID NO: 883567 - DNA, 99 bp, Homo sapiens
gaccccacagtgcagcgctccgtgtttgcatcggtggacaaggtgccaggtaaaatgtcggttccaggaccttaccaggcggccactgggccttcctca

SEQ ID NO: 883568 - DNA, 99 bp, Homo sapiens
tttcctcgtggaatttgaagattctacagataaatcaggtgattgatatgcccgagcacaaccctggcaatttgggaggaacaatgagactgggaataa

SEQ ID NO: 883569 - DNA, 98 bp, Homo sapiens
caggacgcgagcggcggcgcctcggccctgggctgtttagttggcaaacatgaattgactgggcataaagtagctgtgaagatactcaatcgacagaa

SEQ ID NO: 883570 - DNA, 75 bp, Homo sapiens
cagctgcaaggagttactgaagaggccacaagaggaagctgaatgaagaggacgccgccagcgagtccagcaggg

SEQ ID NO: 883571 - DNA, 99 bp, Homo sapiens
ctcctggcgctgcgggcgtccccacaggcgaggattaaatccaccacacagggtgaaatctatctccatgacaacattcacacaacaggaaattgaatt

SEQ ID NO: 883572 - DNA, 98 bp, Homo sapiens
tctccattgcacaatggccagccctgaatccgaaagtcatctgagttggctatctgcacgttctctctgtaccagtgaacttgaactgtggctgtggc

SEQ ID NO: 883573 - DNA, 98 bp, Homo sapiens
aaagcaggaaaataaaactcttttgaaagttgtgggtcagctgaccagtgccaccgtgggccttaattgcaatagccatagtcgcagtccttttagtc

SEQ ID NO: 883574 - DNA, 75 bp, Homo sapiens
gagggaggagaatggggagaaacaagccatggagaggttgctggaagcagctcgagagtgtcgtagaaagaagaa

SEQ ID NO: 883575 - DNA, 98 bp, Homo sapiens
agagagagagagagaagaaagggagaagctgaggagggtgggaaaccccgtaaacaccggaaggatcggctacaagatttaattgatataggctttgg

SEQ ID NO: 883576 - DNA, 98 bp, Homo sapiens
gctgaagaaatttgtgtggagcgaggaaaggtgtgctgtgcctgaggccagcagagcatcctggccagaacaagccaaggagccaagacgagagggac

SEQ ID NO: 883577 - DNA, 99 bp, Homo sapiens
tccactgcgggccggcgaaagctggacgaagttccggaaatggaattaccgagtcagatgagaaacacaagtcatcaatgaattaacaagcaacacatt

SEQ ID NO: 883578 - DNA, 99 bp, Homo sapiens
ctgggcctgtgatcgaggacataaggaactagtcacagtgttgctgcaacatagagctgacattaactgtcaggcctactactactgtgccataataga

SEQ ID NO: 883579 - DNA, 98 bp, Homo sapiens
aagtgtaatggccgccatcagggactcgcaggcaatgggtactacgacagatctgaacataaagtctggtctcctctggtgacggaggaagggaagcg

SEQ ID NO: 883580 - DNA, 76 bp, Homo sapiens
catgagtgatgtggaggaaaacaacttcgagggcagaaatgaagtccctgaggtgaagaaagaggagactttgctg

SEQ ID NO: 883581 - DNA, 98 bp, Homo sapiens
gtggatcagaactgtgttcgcaattcttacgatgtcttctctttgctacgtggaagatagatgataagcctgtaaaaattgacaagtgggatggatca

SEQ ID NO: 883582 - DNA, 100 bp, Homo sapiens
aacctcatgaatagcaatcacagagactcggagagcatcactgttgctgccaaacaaggtgaatccgacccagagaggaaagaaacaaggcagaaagtag

SEQ ID NO: 883583 - DNA, 98 bp, Homo sapiens
agtggatcaccgcgctgcactacgcctttcaggacgagaaccacctgatgaggaaaatgaggcccaaagaagtgatgccacttggttaaggtcccaga

SEQ ID NO: 883584 - DNA, 76 bp, Homo sapiens
acctgggcatccctctgggccaggacgccgaggagaaatgttgctgaagtgctgctgaaagggccagagatgcaag

SEQ ID NO: 883585 - DNA, 99 bp, Homo sapiens
atatgtgaaggagctccgggctccctcctgcattgtatgtggtagaagaccaaagaagagatgagctaggaccatccacctgcctcacagcctgctgga

SEQ ID NO: 883586 - DNA, 98 bp, Homo sapiens
tgccctcctggacgcggagccttttgtcccatgaggagcacccccatagccatcctctctatggacatggtgtatgcaagtggccaggctgtgaagca

SEQ ID NO: 883587 - DNA, 99 bp, Homo sapiens
gattttctgttttcggaagttgctgggttcgttttattcagcggcagtggtgctttcccgaatctcagaatgccggaggaaataatgctggccatacag

SEQ ID NO: 883588 - DNA, 99 bp, Homo sapiens
gaaatagcagacagcgggcttgatgtgcttaaaagctgcatcaatgtccgagttaccaccatggatgcagagctggagtttgcaatccagccaaataca

SEQ ID NO: 883589 - DNA, 99 bp, Homo sapiens
gcgagcgaggaggatggcggagtcggggctcctgacgggtggcccagttgaaatccttcccttcctctaccttggaagtgcctaccatgcatccaagtg

SEQ ID NO: 883590 - DNA, 76 bp, Homo sapiens
aattcaaaagatttacaccagataactttatgaaatcttcctctcaagagcaaaagaacggtggaaaagtttcagt

SEQ ID NO: 883591 - DNA, 75 bp, Homo sapiens
cggggagagccggggagccgggcccgcgcgccgagacgaaagcgccgtaacttcagcaaacaggccactgaggtc

SEQ ID NO: 883592 - DNA, 98 bp, Homo sapiens
tgaaactgaatcacaggagatatttccaggtagtaaacctattgatggcaattttgctgactgtggaagtgactcatccaaactccatgccagctgtc

SEQ ID NO: 883593 - DNA, 99 bp, Homo sapiens
agctctggaaaatgacagccttcatttctctgaacatactgccttatgggacagatcaagtttcccaggcagctgcagacttgaaacagttctgtctgc

SEQ ID NO: 883594 - DNA, 99 bp, Homo sapiens
tccaagccaaaatcacagctttgagtgagaaacaggcctggaagaaacgctggtttatcctgcggagtggccggatgagcggtgacccagatgttctgg

SEQ ID NO: 883595 - DNA, 100 bp, Homo sapiens
gaatgagattagattggtttaggttacaggtgcaaaatgagttgataacaaccagaagttgacttgttagtgctgtgcttctactcgagcttggaaaaat

SEQ ID NO: 883596 - DNA, 98 bp, Homo sapiens
aaagttaatgccaagaagcagccgccagttgggatcaaatgtgagcctatggatcaaggacctgcaaatgcaactggttgatcctgaagacataccag

SEQ ID NO: 883597 - DNA, 99 bp, Homo sapiens
catcgtattacacctgaggaggccaagggggagcagcctctgggagtgacagtgctgacaagaaggctcaaggtcccaaaggtggtggcaatgcagtaa

SEQ ID NO: 883598 - DNA, 99 bp, Homo sapiens
actccctgcgccgcctcctcccaccctgagcagagccgccgaggatgataaacacccaggacaggtatttctggtggtcgcattcatatgtcagtttta

SEQ ID NO: 883599 - DNA, 98 bp, Homo sapiens
ctggggacgcgtcctcagacgcagcgtctagtccctggccatagctccgccgctgcccgtgccctgcaggagtcattaaatcaaaacttcatgctgat

SEQ ID NO: 883600 - DNA, 99 bp, Homo sapiens
cgccgtattttctactagcgtggaggaacggaggaagaatccattcacactccccaaaccagacgtccttctatggccgcttcaggcacttcttggata

SEQ ID NO: 883601 - DNA, 75 bp, Homo sapiens
gcctggatgacacaagcacgagcaggagctgccagagcatgacgagcctgttcagtaacactgtgtcaccgaccc

SEQ ID NO: 883602 - DNA, 76 bp, Homo sapiens
ctaaacttgatccaaagacaatgaaggttatggaggttttgatgactatggtggctataataattacggctatggg

SEQ ID NO: 883603 - DNA, 100 bp, Homo sapiens
aaacgaacctctatatccgaggactgcctccccacaccaccgaccaggacctggtgaagctctgtcaacctggacaagcgcaaccaagcctaaaggcaag

SEQ ID NO: 883604 - DNA, 75 bp, Homo sapiens
ctttgtttcctagtgagaaccgagtcagtgctcttacccagacctgtggatatctgggctttgggctgtatgatc

SEQ ID NO: 883605 - DNA, 99 bp, Homo sapiens
aaggatcgcggggcccggagagcgtggggtagagcagcggctgccatgctcttctgtggcttcatcatcctggtgatctgtttcatcctctccttcttc

SEQ ID NO: 883606 - DNA, 99 bp, Homo sapiens
gacgtccctattgtccacactgagaccaagaccatcacttatgaggctgcccaggttcttcagatagatcctgaagttacagatgaagaaataaaaaag

SEQ ID NO: 883607 - DNA, 98 bp, Homo sapiens
gggagcgtctccgtgacacggaccttggacagagaagtaatcgctgtttatcaacctgactggcagccctatttgccacagaacggagacaacattga

SEQ ID NO: 883608 - DNA, 98 bp, Homo sapiens
gggattacaggcacgcgccaccactcccagtgacttatcagatgccctggtcatcttccagctctatgaaaagatcaaagttcctgttgactggaaca

SEQ ID NO: 883609 - DNA, 98 bp, Homo sapiens
tgctgcccctgttgctgaccatggcctccggtgtggctgtctctgatggtgtcatcaaggtgttcaacgacatgaaggtgcgtaagtcttcaacgcca

SEQ ID NO: 883610 - DNA, 98 bp, Homo sapiens
ttcctgcccggcgcctggcggggcctccgcgaggacgagttccacatcagtgtcatcaggtgtgactgcacagaaaagttacaaaacaaatttgactt

SEQ ID NO: 883611 - DNA, 99 bp, Homo sapiens
gagtgacaccttggctatggacatgcgtgtcaggagtttctgtgtgaccagaagtacagtgatgaagagaaccttccagaaaagctcacagccttcaaa

SEQ ID NO: 883612 - DNA, 76 bp, Homo sapiens
ggaggcagctgcggcggggccgaaagccttgagccgggccatgcttctcacatcttacctgcctcctcccttgttg

SEQ ID NO: 883613 - DNA, 99 bp, Homo sapiens
aatggcaccacagcagggactactagacaaaataaaagatgaacctgacaatgctcaagtccacaaggcgattacaatttccagtcccctaaccacaga

SEQ ID NO: 883614 - DNA, 75 bp, Homo sapiens
ctaaggcctcttcaacaagtacacctggcacgtgtggttctcaaatataggcattctgatgggaacttgtgtgtt

SEQ ID NO: 883615 - DNA, 99 bp, Homo sapiens
agccgaggtaacgaacagctcggtggcagggcctgactgctgcggaggcctcggcaatattgattttagacaggccacgtgcgagcgagggtttgcagc

SEQ ID NO: 883616 - DNA, 99 bp, Homo sapiens
tcaccaagaaattactgtctcaagtgatacggacctgatcccaaccttgaagaaagtcctaaaagaaaaaatattacatatgaggaattaaggaataag

SEQ ID NO: 883617 - DNA, 98 bp, Homo sapiens
cctgttaatgttgatattttgacctccttccatgaatcacaaatgttcttaatggcatctagaatgcttcctccagattaggccgagcacttgctgag

SEQ ID NO: 883618 - DNA, 99 bp, Homo sapiens
caagcagcctattatgcccagacaagtccccagggaatgccacagcatcctccagcacctcaggttgatggaaatcacaatcttctgacaaagctttct

SEQ ID NO: 883619 - DNA, 99 bp, Homo sapiens
gggcatcagtgatgggactgagtactggattgtccggaattcatggggtgaaccatgggttggtgttcgaggaagagacattgttgttcttggtgtgga

SEQ ID NO: 883620 - DNA, 75 bp, Homo sapiens
gcgcattggactgttcagtcatgcggagattaagcccatgaagcttcccatcaccaacagcaggcagcacagaac

SEQ ID NO: 883621 - DNA, 98 bp, Homo sapiens
atgaatcctgcggcagaagccgagttcaacatcctcctggccaccgactcctacaaggatctaagtagaagccagaaatgcatcagaaaggaaggttc

SEQ ID NO: 883622 - DNA, 98 bp, Homo sapiens
gaccatggccgatcctcgcgtgagacagatcaagatcaagaccggcgtggtgaagcggtcaacgaagtgacggtggaacagctggtgcagcagtaccc

SEQ ID NO: 883623 - DNA, 99 bp, Homo sapiens
acgtggcctaccaggtctacctcctacactacagaatccagaagtcagatttcagcaacaactggaacaactcagtgcaatgggatttttgaaccgtga

SEQ ID NO: 883624 - DNA, 98 bp, Homo sapiens
ctctggacaagctggaatgcatccaagagaatccctcaacatgctgttgcctgacctggtaccccagctggggacactctaccagttaatggaaagca

SEQ ID NO: 883625 - DNA, 98 bp, Homo sapiens
cgagatctccgaccagtctgggggcgctggcggcctgcgcagccacctcaaggattttggagatggaggtgcttttccagagatccatgtggcccagt

SEQ ID NO: 883626 - DNA, 76 bp, Homo sapiens
gcaggccatggacagcgaggactttcctcagccacctcctaagctgcccaacggtgtgttcacccccgacttccag

SEQ ID NO: 883627 - DNA, 99 bp, Homo sapiens
tacgccagcaaggtcagcgagggcatggccctgcagctgggctgcctggagctcaggactgagagtggctttcacaatggaagggatcagtaatttcaa

SEQ ID NO: 883628 - DNA, 98 bp, Homo sapiens
tcaaccctaccccaggagggaccatctctcgagggtctccaactgaattccttgaagagaaaatggcctaccaggaatacccaaatagccagaactgg

SEQ ID NO: 883629 - DNA, 98 bp, Homo sapiens
atgattccctgcaggccatcaaactgcagtgcattggcaaaaccgtggaaagccagctttataccaacccagtgctgaggaatgtaaacaagtttgct

SEQ ID NO: 883630 - DNA, 100 bp, Homo sapiens
cattggcaaagcaactgcccttgaaatcgccaagcgaggtggggtgaccgctctctgttgggacccagtccagcgggtgttgttctcaggcagttcagat

SEQ ID NO: 883631 - DNA, 99 bp, Homo sapiens
gcgtcctgttcttcctgggggactggcaggatattgtacctgtggatgcatcttatgaagtaaaagaactatatgtgccagaaaataaacttcatttgg

SEQ ID NO: 883632 - DNA, 75 bp, Homo sapiens
tctcttcctgtgccagatgattagtgcactggaagtacctcttgatccatatgaaacactctcagatgctaatag

SEQ ID NO: 883633 - DNA, 99 bp, Homo sapiens
ggcccgcggcagcgactcggaggacggcgagtttgagatccaggcggaagatgacgcccgggcccggaagggaggatcaaccgccaaaggcacagctct

SEQ ID NO: 883634 - DNA, 75 bp, Homo sapiens
cgccgcgctgcgcccttcggccgcctacttcggatcctgaggaggatgaaggggctggccctggaggccgagagt

SEQ ID NO: 883635 - DNA, 98 bp, Homo sapiens
gagaatttatcacaatggttgtatacaagactgatgggaaaaaagtttattacccaggcctatcatggtcaccatcaagcactggaagtgttggtaca

SEQ ID NO: 883636 - DNA, 99 bp, Homo sapiens
tcatcctgtccatcgtgtgcctgatgatcacgcagctggctggcttcagtggaccagtcatcttccacgatgttgctgtgctgacggataagctcttcc

SEQ ID NO: 883637 - DNA, 98 bp, Homo sapiens
ccacagctttaggaaacacctctacctcctgcgaggcctcccgggctccgggaaaactacactggccaggttttgatgatgatggttcagaatttcat

SEQ ID NO: 883638 - DNA, 100 bp, Homo sapiens
ttgactatgagatgatcttccggggaacaggagcactgatatttgtcattgactcacagtttgccttctgccgggaatgtaaagaagcgtaccatgaagg

SEQ ID NO: 883639 - DNA, 99 bp, Homo sapiens
ccttccaaatttccttttccaactaagccaagaaggatcaagaaggtggagaagaaaagaaatctgtgcaaaagaaaaaagtaaaagagttaaaggtgt

SEQ ID NO: 883640 - DNA, 99 bp, Homo sapiens
aggattccatgggggacctctattccttctcagctctcatgaaagccctggaaatgccacaggtacaagaggaatttgaaggctgtttattttgtacat

SEQ ID NO: 883641 - DNA, 98 bp, Homo sapiens
tcccacaggtatgggctctacgtgtgcttcttgggcgtcgttgtcaccatcgtctccgccttccagttcggagaggatttggaacttggaaggagtgc

SEQ ID NO: 883642 - DNA, 76 bp, Homo sapiens
agaaaaagcttggagataaagttgctttttactgcctccattgtgttccctcctccaggggcttctgaggagaatg

SEQ ID NO: 883643 - DNA, 99 bp, Homo sapiens
gtggcttcacgcagaagttggcaggagcatgggcttcggaggcctatagcccgcaggggaaagtgcagtgttgcccttctgaatgagacagaatcagta

SEQ ID NO: 883644 - DNA, 99 bp, Homo sapiens
catgatagagcagagtggaccaccccatgaacctcgatgtgctagtgctgctgatgacagatgtactggtgtttctccaggaaaaggaccagaagtaca

SEQ ID NO: 883645 - DNA, 99 bp, Homo sapiens
gcaaacaagccaatcccaggaggaaaaacgggaatgcagtggtgtcttttgaaagaagaggatgtcattcctcgtatcagggcaatggaaggtcgtaga

SEQ ID NO: 883646 - DNA, 98 bp, Homo sapiens
cttattacacaagccacacctcatgttgctcctgtgatgccattagatcgtttcattacagctgggaatggaggaagaagatgtgattgaagtttatc

SEQ ID NO: 883647 - DNA, 99 bp, Homo sapiens
acgcgcagccccggcctctcggcctctgccggagaaacaggttttgaacgaagaatgtgatcagaactggtacaaggcagagcttaatggaaaagacgg

SEQ ID NO: 883648 - DNA, 98 bp, Homo sapiens
gtggctactatggaaggcgccgtggccctccccggaatgtgattgtagagaaggctccaaaagccagggtgcctgatctggacaagaggaagtaccta

SEQ ID NO: 883649 - DNA, 99 bp, Homo sapiens
aactacatccgctcccgccgagacatccgctccttgcccgagaacatccagtttgatgtttactacaagtgtaatgaacaagtctggggtgaatcgtgt

SEQ ID NO: 883650 - DNA, 76 bp, Homo sapiens
cagtcccacttcaaacattcgtctcggaaaccccgcctcttacagtcacgaggatagcaaaacctgatctcataaa

SEQ ID NO: 883651 - DNA, 99 bp, Homo sapiens
ccctcttagtgtacagaagttcatgttaattgctggccctcggagagtggaaatggctgtgatgtcaacatagaatatgagctacaagaagataattta

SEQ ID NO: 883652 - DNA, 99 bp, Homo sapiens
aaggctgagcaggtctaaaaatgaaccaagaaaaacaaacgtcacacatgaagaacacacagcggtggaaaaggttctgatctacaatggccaactgga

SEQ ID NO: 883653 - DNA, 98 bp, Homo sapiens
gcatggcaaagactggcaaaagcacaaggattctcgctgtgacagagacaacaccgagtatgagaatcacagaagatcttattagacggaatgctgaa

SEQ ID NO: 883654 - DNA, 98 bp, Homo sapiens
gcagccctggccagagaggagtgcctgagactaacagaactgctgggcgaatctgagcaccaactgcacctcaccagcttgtacctccttttaaacct

SEQ ID NO: 883655 - DNA, 98 bp, Homo sapiens
ttgtgttgtggaagaatggttatcagaattcaaggcatctccagaatatcagaaactgcaggattccagttcttgttatgagtgtcttgctctccatc

SEQ ID NO: 883656 - DNA, 75 bp, Homo sapiens
ttttatttggcagatctgaagggaaagctccagatactagtaccttaacatggggaatcttcttaaagttttgac

SEQ ID NO: 883657 - DNA, 99 bp, Homo sapiens
ggagcacgagaaatacggcgtggcactgggtattgtacccctccaatatgtgtttgttatgacctttacacttgatgatggaacaggagtactagaagc

SEQ ID NO: 883658 - DNA, 99 bp, Homo sapiens
tgaacaatggacagtcctggaaggctctgtgtccaaagaacatgaggaaccaagcgtgaggaatgcaggagtgatgccaggagtgaggagccgagcagg

SEQ ID NO: 883659 - DNA, 75 bp, Homo sapiens
aagagccaacaccactatctgagtcagaaattggctttggaaaaatggaaacctacatcaaattggaaaagcttg

SEQ ID NO: 883660 - DNA, 76 bp, Homo sapiens
gggaccaggaccgggccccactttccagaggcctcatgggacctgtcaggatgatttcatctggacacgagttaac

SEQ ID NO: 883661 - DNA, 98 bp, Homo sapiens
tggaaccggatatttaagtacaatggtgggcttaattttagaaacagatgattatgctgagattatagatgaagaagatacttacaccatgccctcaa

SEQ ID NO: 883662 - DNA, 98 bp, Homo sapiens
ttggctgccgtccccgctgctgtgcattggaacctgcagatgacagcagcttctcgctgtcccaggaggttctccggcacctgcggcaggaggaaaag

SEQ ID NO: 883663 - DNA, 99 bp, Homo sapiens
tgggccatcacaaatgcaacttctggaggatcagctgaacagatcaaccttttattggaagactgtgaagaagcttttctgaaaaaccctgaaggaaaa

SEQ ID NO: 883664 - DNA, 76 bp, Homo sapiens
cacatatttacctgaatcacatcgagccactgaaaattcagttactgtaaaatggggaaaggagaaatttgaaggt

SEQ ID NO: 883665 - DNA, 98 bp, Homo sapiens
ggaggtctacatcccgtcctttcgctatgaagagagcgacctggagcggggatacacggttggaattgtacagtatggagaaaacgtgacccatgagt

SEQ ID NO: 883666 - DNA, 99 bp, Homo sapiens
aaagctagaagaaaaggtgtacttgcaagaaacctcaggacttgagtaacagcaacatggtgccgtgctactcatatgggcagaagctgtccaaactgg

SEQ ID NO: 883667 - DNA, 74 bp, Homo sapiens
atggtgatgattagagacatactaatgtacatggagctacagggagctggccgactgcacctggcacatggcgg

SEQ ID NO: 883668 - DNA, 99 bp, Homo sapiens
ccaatcctggagctgctgttgcagcacttgttccccaaacaagtgctcctacattctggagccatgtggctagaaatcctcctcacttcagtgctgggc

SEQ ID NO: 883669 - DNA, 99 bp, Homo sapiens
gaggggaattccagcaccgcagcaaccactccagaaactttccctccttcaggttaatccctatatcctgaagaagaacatgatcctcatgacaaatca

SEQ ID NO: 883670 - DNA, 99 bp, Homo sapiens
tgcagtgtttggtttgtgataaaacactcctggggaaagagtcactgcagtgttctagtaaaagatacctgctttcttcagcctatgtagacagccaca

SEQ ID NO: 883671 - DNA, 76 bp, Homo sapiens
caaggccaagtatccgccagtcaataggaagtacgagtactgacgacaacagtggagacttggacccaggagtctt

SEQ ID NO: 883672 - DNA, 100 bp, Homo sapiens
ttatcgatgtctacatatatattctgtcctggggttaagcatctgaaaggccagaatgaatcagcattccctgaagaagaagaaggcaccaatgaaagag

SEQ ID NO: 883673 - DNA, 99 bp, Homo sapiens
ttctaaaggctcctgtgaacactgcagaactaacagatctcttaattcaacagaaccatattgggagtgtgattaagatcattgctgaaggtgccaatg

SEQ ID NO: 883674 - DNA, 76 bp, Homo sapiens
tccgagggtgtcctgttacttccaagtcatcaccagaaagggtatttgaagtataccatacaactgttttgaaaat

SEQ ID NO: 883675 - DNA, 99 bp, Homo sapiens
tccctgctgaatcacacgccgccatccgggaggcccagggaaggactatgctgagaaggaaaataccatagcaaaagctctggaagatctgaaggcaaa

SEQ ID NO: 883676 - DNA, 98 bp, Homo sapiens
ttttggattacaactgttcatcctcacctatgcaaagaaagggaagctattgctgggattttgaggaggagatgagtatgatgtatgtgccatttgtt

SEQ ID NO: 883677 - DNA, 98 bp, Homo sapiens
tggagtgtaggtcatatcgccgcggagattgaccccagcctgggcgtggcggagctgcctgacgagttcttcgaggaggacaacatgctgagcatggg

SEQ ID NO: 883678 - DNA, 98 bp, Homo sapiens
gtatacttacttcagtgctgttgctggacaggctggaggctctcaggtcatttttaccaacccattggagatagtgaagattcgtctgcaagtagctg

SEQ ID NO: 883679 - DNA, 98 bp, Homo sapiens
ccagttattgaatatcaagaggaggagttgttgagactgaattcccttcaggagcttcaacttcttgaaatcatgtgcaattatttccaggagcaaac

SEQ ID NO: 883680 - DNA, 76 bp, Homo sapiens
gatggcagtgttttagctgctgggttacctgtgcatgacagatgagtggttctctgagtatgtctacgaagtggtg

SEQ ID NO: 883681 - DNA, 98 bp, Homo sapiens
tgacagtggagacactggcattggaacttcctgttctgatagcgtggaaggttttaaaatcaaagatgggaaaatcggagaaaattgcccttccccat

SEQ ID NO: 883682 - DNA, 99 bp, Homo sapiens
tatgcccattttgctgtgtgttacaggcacagaccccacaggctcctcggacactgggtccatcacctcctgccccatcatccactccaacaccaacag

SEQ ID NO: 883683 - DNA, 98 bp, Homo sapiens
ccattcggaaagacacctggccagcggtccagagctgatgcagaacatacatatgatagttgagaaagacacatattctgatcatgaagaaataaaca

SEQ ID NO: 883684 - DNA, 76 bp, Homo sapiens
cggaaagcggcggactatgtccgaagcaaggatttccgggactacctcatgagggaggtggggaagacagggctcc

SEQ ID NO: 883685 - DNA, 99 bp, Homo sapiens
atcacttgagatcaggagttcgagaccagcctggaagcatctcgaagaacagccctgccacactctttgaagttcctgacacatggtaaccaagacctg

SEQ ID NO: 883686 - DNA, 98 bp, Homo sapiens
acggtggttgctgccttcgtctgcacttaccttggaagccaatatatcttcacagaaatggcctcgattcttggtgccaccattgagaactccaggat

SEQ ID NO: 883687 - DNA, 98 bp, Homo sapiens
aatgatgtgaaccttcgcattcagaatttgaccatcttggtgagaaacattaagacctactaccaggtagattttcgttccgtcacccaggctggagt

SEQ ID NO: 883688 - DNA, 99 bp, Homo sapiens
gtaaaccaagaagaaatccacagatttagttctgacttccttcgctgggcatctggctgggattcttgttggactaatgtacactcaagggcctctgaa

SEQ ID NO: 883689 - DNA, 76 bp, Homo sapiens
atcctggggaatttaagatgccaaagcagctcattcacatacagcatcctgataacttaagtgactctctcttttc

SEQ ID NO: 883690 - DNA, 98 bp, Homo sapiens
agggtggcactggctctcctggtccagctctcaggacaagaacaaagtgtgctggagttggtccaggtagcaatgatgagacccttttatctgctgtt

SEQ ID NO: 883691 - DNA, 98 bp, Homo sapiens
agacctctgctggcatctgcgattgcatttttcctgttttaacaacggctgtgctagacgaagtggtgaagcccaaaattagactttcttgtacctaa

SEQ ID NO: 883692 - DNA, 99 bp, Homo sapiens
cgcagggagctctcgaggcaacgccggggcgcccgaggtctggaaggcgcaggtgcagattcactttataggaacagcttcagcttcagtgatgaaaaa

SEQ ID NO: 883693 - DNA, 99 bp, Homo sapiens
agacttcctctgctaaattacctcgctgccgacagggaggctgggcaggtgattccgtgaaggcttcgaaacctaatctgggagcctgcaagtgacaac

SEQ ID NO: 883694 - DNA, 98 bp, Homo sapiens
aagattttggtgtacactgcaaacagcatggagaatggtggaaagcaaagtcccttttaacaaaaaaagaaggcttcatccccagcaactatgtggcc

SEQ ID NO: 883695 - DNA, 99 bp, Homo sapiens
tcccatccagaaggtctcagcacactgatgatagtgccttgtgcatggtatgtcgagagtaccaacgtggcaattgcaaccgaggagaaaatgattgtc

SEQ ID NO: 883696 - DNA, 99 bp, Homo sapiens
ttgaaaccataatgctacaaactctaggctagcctgaaagctgactctataaataagccctttgcacagcagtgccaagacttggttaaagtcattgag

SEQ ID NO: 883697 - DNA, 99 bp, Homo sapiens
atgggccaaggaaaaatcgagcagaaagaatgtctttcagataatatcgtctactgcattatttttggctgcaaaagtggaagaacaggctcgaaaact

SEQ ID NO: 883698 - DNA, 99 bp, Homo sapiens
gacggcggaagcggagagcaacagcgcgccggaaggagatggataaagcagatgtttattggggcattccttatcccagctatggtgtgtggcactgcc

SEQ ID NO: 883699 - DNA, 98 bp, Homo sapiens
gaaagccagcctaatccaaagactgtggaacttttaagtggagtggtggatcagaccaaagatgggcttggacttaaggatcagcaggagagagaaat

SEQ ID NO: 883700 - DNA, 99 bp, Homo sapiens
ttctctaggccttttagaaaacatgcttggtgatccagctatttttcctgccgtaattgtggaacatgttcctggtgctgatattctcaatagttatgc

SEQ ID NO: 883701 - DNA, 99 bp, Homo sapiens
ccttcaactccacttttatctccaccatagtgaaggagaacgacctgctcagaatgagaagaggaaggagaaaaacataaaaagaggaggcaatcgctt

SEQ ID NO: 883702 - DNA, 99 bp, Homo sapiens
agattgaagtttagcgctgataaagtagacacaatgattgttcaggcaatttgattccggagtttgaatccacctttgacaattgtccgaaagacgttt

SEQ ID NO: 883703 - DNA, 74 bp, Homo sapiens
tgcagcgcctgcgcgtggcgttgcagaagctttccggcacagactcgtttgtgaacagccaggagtggacgctg

SEQ ID NO: 883704 - DNA, 98 bp, Homo sapiens
acatcatgaagtcggcggatgtggagaaagaatgtgatcaatgggcaggactacgaagtgatgatgcagattgactgtcaggtgatggacaccaggat

SEQ ID NO: 883705 - DNA, 99 bp, Homo sapiens
aaaggattggattggcatctttagagttgagactgagctaaagttaatctgttgtgacattctggatgtactggacaaacacctcattccagcagctaa

SEQ ID NO: 883706 - DNA, 98 bp, Homo sapiens
ccaaggctcaggtgatcctcctgcctcagcccccaagtagctgggacctacaggatatatcccctggggcagctggtggggctgaagatggtttcttt

SEQ ID NO: 883707 - DNA, 98 bp, Homo sapiens
ttcagttgcacatccccacatcaatgcactgccaatgagttttccgtctgatgaaggttggccatttgcaaagtatcttggagcttgtggaagaatgg

SEQ ID NO: 883708 - DNA, 76 bp, Homo sapiens
aagaaaacaaaatggtggtatcatgagatggccgaatcctggctgctggaggcaagtcaaatcatcttcatttgtg

SEQ ID NO: 883709 - DNA, 98 bp, Homo sapiens
tttaatgagtgtattcttctcttctccgatttaccagaagaaagctgtggtgattcgtcacttgtataatgaagataatgttgacatttctgaggata

SEQ ID NO: 883710 - DNA, 98 bp, Homo sapiens
ttgtaatcagcttcttaccaaatacagaaggccttagaaaatttacgtgtatacctgtgtgagaaaatcatagctgagagacattttgatcatctacg

SEQ ID NO: 883711 - DNA, 99 bp, Homo sapiens
atgtgaagttttcaagtacaatcgaaggcctgcaggaatcccagccattcccgggatccgaggacccaaagggcagaagggagaacccggcttacccgg

SEQ ID NO: 883712 - DNA, 76 bp, Homo sapiens
catgcgagggcgctctacgtacttgtggtctacgatcccggcagcggctccgctgaagggcccaggcccctcttcg

SEQ ID NO: 883713 - DNA, 99 bp, Homo sapiens
catggaaaagtgaaagaaaatgatattgtctttgatccatttgttggaacagatttccttgctgaaacagaatctggagatacagctttcccagtctca

SEQ ID NO: 883714 - DNA, 76 bp, Homo sapiens
tgccaacccaaattatacctggttctggcagagtggcatgattccgactggatactctcagtgccagccaaattac

SEQ ID NO: 883715 - DNA, 76 bp, Homo sapiens
gtctcccaccagagcacggaacatgaaggactttgaaaatgtccgggcccaccagctggtcttgccaccttgcgac

SEQ ID NO: 883716 - DNA, 99 bp, Homo sapiens
agttttatcagaataataaagacttcattgattcacttgaaactggaggaagcagcatctcgtgcagcagaagaggaaaagaaacgccttcagactcaa

SEQ ID NO: 883717 - DNA, 98 bp, Homo sapiens
gatggtgaagcagatcgagagcaagagctccaaacgagaatggaagccgctggaggaccgtagctgcacagacataccatggctgctgctcttcatcc

SEQ ID NO: 883718 - DNA, 99 bp, Homo sapiens
gcatcgtccgcagacgccgccaccgccatgggctcctgagagaaacagcacccaggactatcttccaaagagttctggatatcctaaagaaatcttctc

SEQ ID NO: 883719 - DNA, 99 bp, Homo sapiens
gatatgcctgaggagagctctgaggaggattcactcaggagggagcatcgagtacagctgtccggcctccaacgagtgtgagatcaccaagcggagacg

SEQ ID NO: 883720 - DNA, 98 bp, Homo sapiens
agaagttgccaaatttgaagcagaacgatcaaaagccaagtggcaaacgacctgtcatttactccatcctttatagtgatgctacaggacgaagagga

SEQ ID NO: 883721 - DNA, 98 bp, Homo sapiens
ccatgcccacggccgccgcccccatcatcagctcggtccagaagctggttctgtatgagactagagctgtgaccatccacggcaagatagcatggatt

SEQ ID NO: 883722 - DNA, 98 bp, Homo sapiens
aaaatagacatgccgcccttcttcccctccgaaatctctgctcctgagtgtttggctttcaaaggaaaaggatattttggataaaccacagtcaatct

SEQ ID NO: 883723 - DNA, 98 bp, Homo sapiens
cgccccgaaccctcctcctgctactctcgggggccctggccctgacccagacctgggcgggttttacctcacaaaaactactacaagcaccaagctcc

SEQ ID NO: 883724 - DNA, 99 bp, Homo sapiens
ccagaaccacctcctttgcggagagctgcaagccggtgcagcagccttcagcttttggcagcatgaaagttagcaaagcctaaagaaactgttccaact

SEQ ID NO: 883725 - DNA, 98 bp, Homo sapiens
gcgagggaggctactgagaagcccggcgacggaggaacgcaggtctgctgccagctggtggatagcgaggtggtcatgctttctgcgcactgggagaa

SEQ ID NO: 883726 - DNA, 99 bp, Homo sapiens
gagggaaagatgagcgaggagacggcgacttctgacaacgagggatggtttagacaacagtgtagcttcacctggtacaggtgacgatgatgatccgga

SEQ ID NO: 883727 - DNA, 99 bp, Homo sapiens
tcttcacgtggtctttaccgtttgttggagaaaaagatgatgtcagttcatacagactgtattgtgtcagtgcagattttaagtacattgatggaaata

SEQ ID NO: 883728 - DNA, 98 bp, Homo sapiens
tctcctcggatcgcctggagaggcactcggacctgtcaggccttgaaaagaggatagaccaggctgtggaggagtggaatattgagaaggctgaggaa

SEQ ID NO: 883729 - DNA, 99 bp, Homo sapiens
ctgactcggagacggacgaggatgaggaggagggggacgagcagcagcggctcctcaacacccctcgaaggaccgcctctttttcgtcatggaatatgt

SEQ ID NO: 883730 - DNA, 99 bp, Homo sapiens
aaaaacaaaacaaatatgaactatgataagctgagcagagccctgcgatactattatgacaaggtagacgttacatccaagaggaaataatccaggcaa

SEQ ID NO: 883731 - DNA, 98 bp, Homo sapiens
gacgtccggcttcggagcgggagtgttcgttgtgccagcgactaaaaagaggatttaagtgccctgtatgctcaaaatttgtatcctcagatgaaatg

SEQ ID NO: 883732 - DNA, 99 bp, Homo sapiens
tgcttttggtttccctggcaggggttgaactgtggagtgtgtggggcagcagcgttctcggatgctagctactctttttaaggatgaaaggtgccagca

SEQ ID NO: 883733 - DNA, 99 bp, Homo sapiens
ggacgccgaccgtccgggacgagagaacaccttctgcagtggggaccatgtgtcctggcacagccctttggataacagtgagtcaagaattcagcacat

SEQ ID NO: 883734 - DNA, 99 bp, Homo sapiens
aaaaacatcttgatctggagaaaaactggatgttggtagaaaaagcaagagtttgttatatagcaggttcatagtggcgtcatgcacgcagactcctgc

SEQ ID NO: 883735 - DNA, 99 bp, Homo sapiens
ttttttgtctggaggaatggggacaccaaaactcatttggcagcagaggtgagcaccaccgtccaaagtggagatgatgtcagcaaaggggatattgaa

SEQ ID NO: 883736 - DNA, 98 bp, Homo sapiens
atcccttcttgctccgtgccatgacagacttcaaaaatcttcagagacctcttcctgtgccaaaactgccacctggggagcaatgtgagggtgaagag

SEQ ID NO: 883737 - DNA, 99 bp, Homo sapiens
gcctgcgcgccgctgcccgcgccacaggcaaaaactgattattccaagtggaagttgccctgttattctgaatacttacttttgtgagaaagttgttgc

SEQ ID NO: 883738 - DNA, 99 bp, Homo sapiens
aatcctctttacatcatagactttcagctacttgaagatagccatcagccgctacgtgactcttttctccaggttctcagctgctgcgggagttgaaaa

SEQ ID NO: 883739 - DNA, 100 bp, Homo sapiens
ccatgactggaggggcgccctgggggttcagattgcaaggtggcaaggagcagaagcagcccttacaagttgcaaaggttgctgaatgctataaagccag

SEQ ID NO: 883740 - DNA, 100 bp, Homo sapiens
ctgatgctttaactttgctggccccagccgctggagacacaatcatatctttagattttggcagcaacggtagtatttatgaagattcatgtgctagtca

SEQ ID NO: 883741 - DNA, 98 bp, Homo sapiens
gccggacccgatgagctcgggagtccaccatcgctctgcaagccgcagtgtctttctcgagaagcaggtggaaacatgagcattcagtttcttggtac

SEQ ID NO: 883742 - DNA, 98 bp, Homo sapiens
ccaagatgacaaaagaagagttaaatgccctcaagtcgacaggggatgggaccctaggggaagatgatgacgacgatgaatgtggggaagagaagctg

SEQ ID NO: 883743 - DNA, 99 bp, Homo sapiens
agataatcacagctggcttatcaatattgctgtttgatgcgatcctgaccagtgcaaccacgggatggcatcaagcatgatggaaccatgtgtgatacc

SEQ ID NO: 883744 - DNA, 99 bp, Homo sapiens
ggaccaattcgggaacaaatactactacatcccgcagtacaagaactggagagtttaaaaggatgcttaatcgggagctcacccatctctctgaaatga

SEQ ID NO: 883745 - DNA, 76 bp, Homo sapiens
ctcagactcagaaagcagcagctccctcagcagtgtgggagcagtgaggagaatgaataccttccaagaccagagt

SEQ ID NO: 883746 - DNA, 76 bp, Homo sapiens
ccccgcgggcgcagccctttgcgcagccgccgggaccctggcccctgtcgaggacgtgttcctcatgatccggcgc

SEQ ID NO: 883747 - DNA, 99 bp, Homo sapiens
aaactgtttgcacattatggcaagaagggcgctgttttcgacaggtgtgcaggtttcggcacatggagattgataagtgtatgctgacttgtaaagtga

SEQ ID NO: 883748 - DNA, 99 bp, Homo sapiens
caaattattccatagcacggataccaaatctgtgctgagatctgtatctgtggacctgaatgttgatccctcgcttcagattgacatacctgatgcgct

SEQ ID NO: 883749 - DNA, 99 bp, Homo sapiens
caccctggaatttgagaatgtgcaggtgttgacgatgggcaatgcggagctggagtttgttcagatcatcatcatcgtggtggtgatgatggtgatggt

SEQ ID NO: 883750 - DNA, 99 bp, Homo sapiens
tggtttgagccaggctgccctcctgctgctgcggcagcctggggctcggggactggctagatctgtgatgttctgcaccctgaacacccacaaagtgga

SEQ ID NO: 883751 - DNA, 98 bp, Homo sapiens
gaaatcattatcagtggtcacagaagtctctaccaatggtgcttcagaagtttcatactttcaggaaattatctcattcaaagctagtgcaactttat

SEQ ID NO: 883752 - DNA, 76 bp, Homo sapiens
gtgacatccgaggtgcctttctccaaaaggagccgggtgtgggctgagccctgcctgattgatgctgccaaggagg

SEQ ID NO: 883753 - DNA, 99 bp, Homo sapiens
gatcatgttgttaccctcggacgtagcccggcttgtattggagttctgccatagaatcatggagtcaacatcccaggacagaagggcaactcacgtcat

SEQ ID NO: 883754 - DNA, 99 bp, Homo sapiens
ggaaggacaccaagatgcggatccgggcctttccgaataacaagcctttgtattcatttgaagataatgcagactatgtttatgatgttatgtggtcac

SEQ ID NO: 883755 - DNA, 99 bp, Homo sapiens
ctcattttctcagtgagcaagcagtttcaaagcttgccagggtttgaggttcacttgaaactgcacggagaggaaatggctagtgatgagctgaaagag

SEQ ID NO: 883756 - DNA, 100 bp, Homo sapiens
agaaggcatcttggaggacttgcagtcatacagaggagctggccacgaaatacgagagaactcaagacatggctgcccagtgtgtcacaaaggtggcgct

SEQ ID NO: 883757 - DNA, 100 bp, Homo sapiens
cagagttcctccgatggccaggaaccttttagtacttccggaatagccaggccagaagaaggaaggcctgtggtgagtgggacaggaaatgacatcacca

SEQ ID NO: 883758 - DNA, 99 bp, Homo sapiens
agacggggttagcggagcaatgcgcaggaataaggaagcgacctgcaaccgacgtgacagcctcatcaagggtaagaaatgagcctagtcaccaagaac

SEQ ID NO: 883759 - DNA, 99 bp, Homo sapiens
gatgagccagagacctacgtggcagctgtgaaaaaagccatttccgaagccttgttgtcctcctggtgcgaagagctcggccgcctgctgctgctccga

SEQ ID NO: 883760 - DNA, 99 bp, Homo sapiens
gcgactgtcattcacaaccccctgaaagcgtatcttgagaattacaaatgctatagaaaaatggaagaggatatttacactaacctcagcaaaatggag

SEQ ID NO: 883761 - DNA, 98 bp, Homo sapiens
gacaggagcattaccacctcagccaccctgaccactatcatcaccatggaaaaagtgacttgagcaggttatccttcccttcaagtggaactggaaac

SEQ ID NO: 883762 - DNA, 98 bp, Homo sapiens
agcagttgctagtggccatttacaggaatcagccacttcagttcagggtatgagtattatagaacaattagaccctgtatcttttagcaattacttga

SEQ ID NO: 883763 - DNA, 99 bp, Homo sapiens
acagctcgacagtacgcctacttctataaagtcatccaggttggcgtgcagtggtgtgatctcagctcattgcaacctctgcctcccggactcaagcaa

SEQ ID NO: 883764 - DNA, 99 bp, Homo sapiens
gaaaatggacgagtaatcgcctgctttgattcattgaaagtacagagtgaagacagtgtcctcctgtttgttattgcatggacgatcacggaaatcatc

SEQ ID NO: 883765 - DNA, 99 bp, Homo sapiens
ctcaaccgcttcgtgcaactctccgggcggccgcacctgccagggcttaaagaagacatgtgtgaccatggaccaggaacgcccacgctctgacctcag

SEQ ID NO: 883766 - DNA, 99 bp, Homo sapiens
ttcagccaggacccgggctccaaggccgtcgccgaccgctacgctgtctactggaacagcagcaaccccaggcatacaagaattaaattctgaataagt

SEQ ID NO: 883767 - DNA, 99 bp, Homo sapiens
tacccaccaacatgggaggattagaaggagctgtggtgtacattgacacagagtctgcatttagtgctgaaagacgttccatcctcagagcagcctgaa

SEQ ID NO: 883768 - DNA, 98 bp, Homo sapiens
gacaacacatctcaagaaactcaaagaatcatactgtcaaagacagggtggagagattcaaccagttagcgtgaaagttggagataaagttcttctcc

SEQ ID NO: 883769 - DNA, 76 bp, Homo sapiens
ccaagccccagtctcgctgcacctctacccgctcagcaggttaccacctatttgcaattcaaggagaatataagac

SEQ ID NO: 883770 - DNA, 99 bp, Homo sapiens
gcagccgtgacctgcagctggcgatgactttgaagaagccaaggaaattttgacaaagatgagatacttttcaaatatagaagaaaagatcaagttaaa

SEQ ID NO: 883771 - DNA, 75 bp, Homo sapiens
accgagacggcagtgcggcggaagcggtgagtgtggtccaagattcagtaaacatatcaggacatactaatacaa

SEQ ID NO: 883772 - DNA, 98 bp, Homo sapiens
ctggtcatgggaccagaggctttatggggagggaagaactgttcttgactttcagtttttcgagcgggtttcaagttaccttatcccatatcacacaa

SEQ ID NO: 883773 - DNA, 98 bp, Homo sapiens
ggaaatgcacagaaattgccaaaaggtaacacgtacacagacctctcggccggaatctccagggatgaccagcccctccccacgcatccagataatct

SEQ ID NO: 883774 - DNA, 98 bp, Homo sapiens
ttcttttgacaacgaacagctcttcaccatgaaatggatagatgaggaagatctgactgcagccatgagcagcaatgagtgcttcaagtgtggacgat

SEQ ID NO: 883775 - DNA, 98 bp, Homo sapiens
tctggaaatgcattttcgaacgcattcagttttgctacttgagaagatagaacatgatgacatctgcaataaaactttgaagattacagattttgggt

SEQ ID NO: 883776 - DNA, 99 bp, Homo sapiens
ttcgagatcaggcctgaccgggataagctccaggttggagtcagttagctgctatgcactgtgttatgctgccagacctactgggattggataaattta

SEQ ID NO: 883777 - DNA, 98 bp, Homo sapiens
gaagatgaagaaacccagcttgatattgttgttaataaaggtatccatggagaacactgaaaactcagtggattcaaaatccattaaaaatttggaac

SEQ ID NO: 883778 - DNA, 99 bp, Homo sapiens
cagtcctcgcatctcagcctcccaaggagctgggacctcaggctgtggatctttccattgatgagtccagcttgacaggtgagacaacgccttgttcta

SEQ ID NO: 883779 - DNA, 98 bp, Homo sapiens
gtggaggctctttgaagttgggttcaggagtgtagaattggcaaagttattgccagcttcctggcaaaagatgtgattgaagagcatggtccttcaga

SEQ ID NO: 883780 - DNA, 98 bp, Homo sapiens
tctcacacaagtggtcagtttggttgtggaaaggaaattgaacttagctcattaagggaagctttgtctttcgtgtcattaattgatggatattatag

SEQ ID NO: 883781 - DNA, 99 bp, Homo sapiens
tcggagaccccgcgccgacggctgctcaaacatcaggccaagacaatgcaaactccagtgaacattcccgtgcctgtgctccggctgccccggggccct

SEQ ID NO: 883782 - DNA, 98 bp, Homo sapiens
aagccttaaacatcagtgtgccgtatggtccaattcctgtggactttcaggttctaatagaagactgtatcccggtactgaagaggtacgccaaagaa

SEQ ID NO: 883783 - DNA, 99 bp, Homo sapiens
gttccagaaattcttatgccggtctagatccaagcaaccaggtctctaattaacagaagatggcaaagcccagccacagcagctatgtccttcagcagc

SEQ ID NO: 883784 - DNA, 99 bp, Homo sapiens
gcggaggcagagaagggaacgcccggcccagcccctttgtgaagtgtggatatgcaggctctaactttccagaacacatcttcccagctttggttggaa

SEQ ID NO: 883785 - DNA, 99 bp, Homo sapiens
ggacaaccaacggctcaagaatttcaagaacaaaggccgcgacttggagaatatgagttggaagtaaagagggtgcaagacattctttcgggaatagag

SEQ ID NO: 883786 - DNA, 98 bp, Homo sapiens
acgcatgggctcagcgggactcagaggtgggttgcctatgaaaaagaacattttaaaggccagcagtttctgcttgaagaaggagactttgaagacag

SEQ ID NO: 883787 - DNA, 98 bp, Homo sapiens
aaacagctatggtgatgattagagacatactaatgtacatgggttccgctatggaagtgatatagttcctttctctaaagtggatgaggaacaaatga

SEQ ID NO: 883788 - DNA, 99 bp, Homo sapiens
ttgtgttgtgtctcctggaggctgccgacatgaagtgctttttcccggtgctgagctgtctggctgtgctggtattctaccttgtaaatactgttattt

SEQ ID NO: 883789 - DNA, 98 bp, Homo sapiens
agaactgaaacaactggaaactgttttggatgatcttgaccccgagtaatagttatgcacgagtgcgagctgtggtgatgacccgagatgactcaagt

SEQ ID NO: 883790 - DNA, 100 bp, Homo sapiens
ccattgaacttcccagcactcgaaagggaccgaaatggagagcaaagattttaccaaatgttgcaagaactctggagttcttatggtagtaaaatgccgg

SEQ ID NO: 883791 - DNA, 99 bp, Homo sapiens
cagtgacgaagagaactgtctcctggtgaccgagcacccgcctccgggcatcttcaactcaggactctggactgtcttcacactaggtggtgtgggcag

SEQ ID NO: 883792 - DNA, 98 bp, Homo sapiens
agtctctgtgtaatcatctgaagaaattggtcccaaggcctgcactgcccaaagtcttggaaacttgctggatatgatgtaccgggagccagcacgat

SEQ ID NO: 883793 - DNA, 98 bp, Homo sapiens
atcaggtgccaccatcagtgcagagaagcattgggggaaccagtgggccccacgtgggtaaaaagcccagattttagtacagttttgaatacctgttt

SEQ ID NO: 883794 - DNA, 99 bp, Homo sapiens
gggagggcttcacctgtgattgttctatgacctcttattctggaaaccagtgcaatgatctgccctctggtggtcagaagatgctgtgctgtctcgtta

SEQ ID NO: 883795 - DNA, 98 bp, Homo sapiens
ttacacagtattgggaaatctgtgaaagcccttgaaggtagtggacccagatcatcccctcgcagcacttgttcgtaaggcacaggctgacagttcca

SEQ ID NO: 883796 - DNA, 98 bp, Homo sapiens
aggagcagcttctagcagtgcaaggtcatgcaagacaagataatctgccttccgaaaagagtgcagcctgctcagaaccactcttccctttcgaatgt

SEQ ID NO: 883797 - DNA, 99 bp, Homo sapiens
tggagatgcttccgaactgtgggcaaaaatggcggtggccattaagcagatgaatcttcagcagcagcccaagaaagagctgattattaatgagatcct

SEQ ID NO: 883798 - DNA, 99 bp, Homo sapiens
gatgatgatctaaaacgaacagccaaaagatatgaagaaatccttgatgatatgaacgagactgccaaacaagaagatattttggaatccacaacagat

SEQ ID NO: 883799 - DNA, 98 bp, Homo sapiens
ggctctgaaggcgaacgcttcgctggccatttaggagctctgctcaaagccagacgccatgaagatggacctacagctaaaaaattaaagactgagca

SEQ ID NO: 883800 - DNA, 99 bp, Homo sapiens
taccaccttggttcgcccactgctgaacaccatccagaagacacagagggttagaatactgtgaagaaagatacaccctggacctgacaggtggcatgt

SEQ ID NO: 883801 - DNA, 98 bp, Homo sapiens
gcaagatcgtcttcagctgttcatagcggtgatttcacctggaacagcatgtcaggccgcagtgtacggctgaggtcagtccccatccagagtctctc

SEQ ID NO: 883802 - DNA, 75 bp, Homo sapiens
caagtttgtgccccatagctgcacagcctcctgacaaggtgatccgggcgggccccgcaggaattttatcccctc

SEQ ID NO: 883803 - DNA, 99 bp, Homo sapiens
cgagactggagcagagccgctgggcgccggagccgaggcgagcgccgcgcgcaccactggaacctagaaagattgtacaatgaatggtgattctcgtgc

SEQ ID NO: 883804 - DNA, 99 bp, Homo sapiens
aacctgttcatcctgtcattttctcagaacaagagcgtccattcctttgattatgactggtacaatgtatcagaccagatcctgaggaggatgaagggg

SEQ ID NO: 883805 - DNA, 98 bp, Homo sapiens
tgattaataattttgggcaaacaccctgtcaattattaaagtggatctgattggtggctacaacattggcaccgtcagccatgagagccgtgtggatt

SEQ ID NO: 883806 - DNA, 76 bp, Homo sapiens
cctggatggaaagaaactaattttcagtttggtgaggattcatcaacctccagtatgatgtctgtgaactttgatg

SEQ ID NO: 883807 - DNA, 99 bp, Homo sapiens
tttcccgccgagggcccggaccccgaatatgacgttgtgctgcatggaaacaacctgttagtatttggaggtacgggcatcccatttggagagagcaac

SEQ ID NO: 883808 - DNA, 76 bp, Homo sapiens
tttacattcactgatgcctacagttaaccagacacagtgcatctgggggaggtgttgtagccattgacaacaaaat

SEQ ID NO: 883809 - DNA, 99 bp, Homo sapiens
tagttctgaattaattggtcctgctgaagctcactcagattccctcattgatacctttcctgagtgtagtacggaagttacagatgaggacacagtaaa

SEQ ID NO: 883810 - DNA, 98 bp, Homo sapiens
aatagcttgtgctgctgctgctgctgctgctgcatgtctaccaggagaggagggaactgcggagcggttttatcttcaagacactaaaagtagtaatg

SEQ ID NO: 883811 - DNA, 98 bp, Homo sapiens
ttaaagataccagatcatgtcagagagagagcttggttaacttgggagaaagtttcatctgtggatggagtattggtttcagaaggatcccacttggt

SEQ ID NO: 883812 - DNA, 99 bp, Homo sapiens
cataaacgtcagtgtgcccaccacccttccctctgccacgcaggtgccgatggaagtccttaagaaagaagacatagctcatccagcaagccgcctttg

SEQ ID NO: 883813 - DNA, 99 bp, Homo sapiens
cgggccctcttcgacagctacacaaatctggaacgggtggccgattactgcgagaacaactacatacaggtgaaattgatcttcaaattctctccaaag

SEQ ID NO: 883814 - DNA, 99 bp, Homo sapiens
cgggctgcgaacaagctccgggaggggccccaaaggaaggcttcggtgactcaggccccttcacagatgtagtcactacaaatcttaaattgcgaaatc

SEQ ID NO: 883815 - DNA, 99 bp, Homo sapiens
aaacagtccaaagaattcttctagaaccctataaatacttacttcagttaccagcaaacggggattcagcgtccgatcctttggaacagggactcacgt

SEQ ID NO: 883816 - DNA, 75 bp, Homo sapiens
gcctgatctcggacttcacagccagcagaactctatggaagtgataaacaagtccagtgttaagtattcagtaca

SEQ ID NO: 883817 - DNA, 99 bp, Homo sapiens
cgcagcgagaccgacctcctggacatcagatcagagtataagcggatgtacggcaagtcgctgtaccacgacatctcgtgagctggagattggatcaca

SEQ ID NO: 883818 - DNA, 99 bp, Homo sapiens
cagcctcctctgcctgcagctccctggctcgctgtcccgcagcctgggcggggacccgcgacccgtcaaacccaggtatttgaagtacacactggacca

SEQ ID NO: 883819 - DNA, 99 bp, Homo sapiens
gacaagatccagggccgtacaataccaattggtaaactttcctgagaatggctttctctctcctgataaactgtctttgctggaaaaactcctacccga

SEQ ID NO: 883820 - DNA, 99 bp, Homo sapiens
atcaacggggtgactggtctctttccttcaaactacgttaagatgacgacagactcagatccaagtcaacagtgtgtcagctgtgatgcatgtttaaaa

SEQ ID NO: 883821 - DNA, 76 bp, Homo sapiens
cgatcaaggccaagtatccgccagtcaataggaagtacgagtactttctgaccaccttaccagtggggagaatccg

SEQ ID NO: 883822 - DNA, 99 bp, Homo sapiens
gagttgcttttggaatgaatttggaatcttcccttgaagaggcacaacgaggccctcttggaggaggcgaagatgatgaacagactgagacacagccgg

SEQ ID NO: 883823 - DNA, 98 bp, Homo sapiens
atgattattgggccaccaagggggtcggcaccaggaattattatagaaagatcggctacagattacaaggcccgtacatggtgaagatgctgaaataa

SEQ ID NO: 883824 - DNA, 76 bp, Homo sapiens
aagaagtccgcggccaggacacagttccggaaagcacagccagataacgaaggaggcccaacttcattcaataagg

SEQ ID NO: 883825 - DNA, 99 bp, Homo sapiens
ataaactgaaagtgcgaactgcctatccgtcattgagacttattcatgctgtcagaggctaaagaggctacaaccatcgatttgagtatcctcgcagaa

SEQ ID NO: 883826 - DNA, 100 bp, Homo sapiens
aaattctggggacgctgggaacactgaatcaacatgggcaatgagaacagcacctcggacaaccagagcctgtgtggtgcccctatctccttgttccaag

SEQ ID NO: 883827 - DNA, 98 bp, Homo sapiens
aaatggaagagtaattgcctgctttgattccctaaaggtcctgctcaggttccaatgatgtccccaaatggttctgtgcctcctatctatgtgcctcc

SEQ ID NO: 883828 - DNA, 98 bp, Homo sapiens
acagctatgcaaatatagaacactaaagtgttacatgacagatgtatgaggggagtaggttgcatctttgttgaaatgatccaaggagttgctgcttt

SEQ ID NO: 883829 - DNA, 98 bp, Homo sapiens
taccatacaaaatattgttgctggatcaacttacctgttttcaacaaagacacatttatctgaggtttggaattcacccagttgcaggccgaatgcct

SEQ ID NO: 883830 - DNA, 99 bp, Homo sapiens
tgacggccacgaacttccgagtgggctgatcccaaagaactaatcaagatggtcaccaggcatgtgactcgacatgagcacgaagcctggcctgaagac

SEQ ID NO: 883831 - DNA, 99 bp, Homo sapiens
tcccccagttccaaagtgtcttaaagagaaagtctgtgattgctgtgagcttcatagcagcgttccttttcctgctggttgtgcgtcttgtaaatgaag

SEQ ID NO: 883832 - DNA, 99 bp, Homo sapiens
gcgcctcggccgaacccctccgcagcagtcaagctacaacttcaagcagaagagagaggagttgtgtctatcaaaggagtgtgtgctaaccgttacctg

SEQ ID NO: 883833 - DNA, 98 bp, Homo sapiens
acaagagaaggcacgcatgggctcagcgggactcagagggagaaacacatctcatctttcctaaaaaagcttcagtggagcagctgcaaaaaattcgt

SEQ ID NO: 883834 - DNA, 99 bp, Homo sapiens
ttcgcggctctaacggggctttctacaagttgaagactgggatagtttccaagctattttggatcatacctacaaaatgcatgtcaaatcagaagccag

SEQ ID NO: 883835 - DNA, 98 bp, Homo sapiens
ccaggactctgcgactttacgctggaagtgatggagagagtattggaaactgtcccttttgccaacgccttttcatgatcctctggcttaaaggagtt

SEQ ID NO: 883836 - DNA, 99 bp, Homo sapiens
ggggaactcctgcgaaaaaccacgggccggaggagcagcagccgcgcgggcccaggtagttacttttggtgacgctgtccagttcccacaatgtatcat

SEQ ID NO: 883837 - DNA, 99 bp, Homo sapiens
acaacttgcagctcatctctattgatgcagagtgacaaagacctcgatgatgccttggataaactctctgacagtctaggacaaaggcagcctgaccca

SEQ ID NO: 883838 - DNA, 99 bp, Homo sapiens
ctaaggcggggaaccgcagcgcagtgacagtgcagaaccccggcgcggcccttggactgcatcaaaacatgtaaacaaggacctcggtaatatggaaga

SEQ ID NO: 883839 - DNA, 99 bp, Homo sapiens
ccatgattataagtttcctgaggcttccccagccatgcgtaactgttggacaccactgcatgaagcttgcaatgttggatattacgatgttgctaagat

SEQ ID NO: 883840 - DNA, 99 bp, Homo sapiens
aaacaatggcatttacagaaagagtcaacagcagtggcaacagtcttctcattcacaggttaaggctacctttccagataatccaacagctaaatcacc

SEQ ID NO: 883841 - DNA, 99 bp, Homo sapiens
caccatggatgcagagctggagtttgccatccagcccaacaccaccgggaagcagctatttgaccagctctgggtgaaccaggaggatgaggtggagga

SEQ ID NO: 883842 - DNA, 76 bp, Homo sapiens
gttcaggcatcacagagcattggaggttccagtgctttcggatttgaaataagcgggttttgaaaacaaaaaaaag

SEQ ID NO: 883843 - DNA, 100 bp, Homo sapiens
gcagaactgcctgattacaggagctttaacaggttgctgcagcaactggtcacacagtagtgttggtagaccagacagaggacatcctggcaaaatccaa

SEQ ID NO: 883844 - DNA, 99 bp, Homo sapiens
tcatgtagaggctggcataacaggacaagagttggaaagacagtggccaatccgccatggtatagttgaagattgggacttaatggaaaggtttatgga

SEQ ID NO: 883845 - DNA, 98 bp, Homo sapiens
gcggaagagatagagcttcgcggagacggcggaagcggagagcaacagcgcgccgccaatcctgaggcaaaagaaacattttaattcactgcacattc

SEQ ID NO: 883846 - DNA, 99 bp, Homo sapiens
gttaagtatgcggcgccaggagctaataccctctaccatctgctttggtcagggtgccgctcgaggatttaaaagcaacaagaagaaaaccaaacaatg

SEQ ID NO: 883847 - DNA, 99 bp, Homo sapiens
tttggtgaagcacttaagaaatgtcatgagattgagagactatatgttctcctttcagccaagacctttcaccagtgcaggggatagaagattcattcc

SEQ ID NO: 883848 - DNA, 75 bp, Homo sapiens
taaggacaaaacgggactggctagttaaacaaagaggctgggtggtgaagcacttgcccaaagcccacatcttgg

SEQ ID NO: 883849 - DNA, 99 bp, Homo sapiens
aactcgatggtgttgtgagagatttctgcagtgaagattgctgtaaaaaatttcaggattggtactacaaggatttacagctgttggaggatggtgatc

SEQ ID NO: 883850 - DNA, 99 bp, Homo sapiens
accaccaaatatcggaacccctccttgaagctgatggtgaatgtgtgcggacacactcttgtggagatgtactttcctcagaatgactcttggattggt

SEQ ID NO: 883851 - DNA, 99 bp, Homo sapiens
aaggaattaccttggagaggctgtgagccacaatgcatcgctggaagtagccagcgtcctccaattcttcaacaccaacaagaatgaggagcaggacat

SEQ ID NO: 883852 - DNA, 99 bp, Homo sapiens
ttgacgcccaggacagcactatctttttttcagatatgtcaaaacacatgatttttaagcaaaagattgatggcacagttcattcagcagacaacacaa

SEQ ID NO: 883853 - DNA, 99 bp, Homo sapiens
ggaggaggaggggagaggcctggaggacaccaacatgattttaggtgatgggcaagtcagaaagtcagatggatataactgatatcaacactccaaagc

SEQ ID NO: 883854 - DNA, 74 bp, Homo sapiens
ggacttcgcgcagtgcctggggtactacggctacagcaagatgatctcaatgccacccaccaacactgtgtttt

SEQ ID NO: 883855 - DNA, 98 bp, Homo sapiens
aatttcacattgcccacttatatgaaacccagattggcagattgctactctggctttactcctgggcggcgctgccatcattctcattgcattcctgg

SEQ ID NO: 883856 - DNA, 99 bp, Homo sapiens
gacagggaccccgagatcgagctctttgtgaagataaacaggggtcacatgacgacagaagccaagagggctgcaaagatggaaaagaagatgaaaatt

SEQ ID NO: 883857 - DNA, 98 bp, Homo sapiens
gtgaatggaccaccacattttacagaaagcacagtgtttccaagatgacttcaaacctgcttctattgacacttcttctgaaggataccttgaggttg

SEQ ID NO: 883858 - DNA, 75 bp, Homo sapiens
atgaatctctgttccaaatgctttgctggattgctgtcacgtctaatgtggctgctgcctcgtgtcacatctgaa

SEQ ID NO: 883859 - DNA, 99 bp, Homo sapiens
agcggatcagagagggctaccttgtgaagaaggaacaggaaatatagtggtcattatgattagctatccaaaaggaagagaaattttggagctggtgca

SEQ ID NO: 883860 - DNA, 99 bp, Homo sapiens
aggacctgtaaacttcatggttcggctttttgtggtgattgtgatgtttgcctggtctatagttggacactgtcttcagccttttcttcaagtttttga

SEQ ID NO: 883861 - DNA, 76 bp, Homo sapiens
ggagatgaaccctgctcttggcatcgactgtttgcacaaggggacaaatgggcttcgtgggacacatatgcaacat

SEQ ID NO: 883862 - DNA, 98 bp, Homo sapiens
tgtgatccaggtctaataacaggatacaaggtgccaagcaccttgatggatgttaatgtgttgatggcagttcagttactaattgaacaagtatcatt

SEQ ID NO: 883863 - DNA, 99 bp, Homo sapiens
caccaaaaccagtcacaagacctggagttgtctgtgcagatgtacgcccaagccgccctggatggagactcccaggccaaacaccagagcaccctagaa

SEQ ID NO: 883864 - DNA, 99 bp, Homo sapiens
gaagtattaattcttccactgatatctcaaaaggtgatctggacaaaggaacaggtatctcaggataacaaagccattgacctttgccgattgtgttgg

SEQ ID NO: 883865 - DNA, 98 bp, Homo sapiens
gacgacagcaccttcacaataactgttgatcagaaaaccttccatttccaggggctgacagatgaagagattgatatggccttccagcagtcgggcac

SEQ ID NO: 883866 - DNA, 98 bp, Homo sapiens
ctgaagaacatgaagtgcagtgtgaagaacgaccactcagcgtacaagagggagttctgggaaatcgttcattcatttacagatgaacagaaaagact

SEQ ID NO: 883867 - DNA, 98 bp, Homo sapiens
ccggacacaacaggagctggcacaaagtggcagaggccgtgtcttccccagctggtgtgggtgtgacctggctagtgaaagagtttctagccaaagcc

SEQ ID NO: 883868 - DNA, 99 bp, Homo sapiens
actagggtcgccggggaagcggacaccaaatcctactgcaagcgagtttattcctaaaggaggatcaacctccaggctgagtaacgtgtcccagtcaaa

SEQ ID NO: 883869 - DNA, 99 bp, Homo sapiens
tgaagacaaagagtggacatttgtcatagaaaataatcatggtgtcatggaaagggatttactttatactgactctgttttggggaagcttttttggaa

SEQ ID NO: 883870 - DNA, 99 bp, Homo sapiens
agcagggcccggtcctgcgcctcgggagtcggcgtccaggctcggagcgcgacacggagactaggtggcagatcctgcccggcctgtacatcggcaact

SEQ ID NO: 883871 - DNA, 99 bp, Homo sapiens
ctcagtaaggactcggcggacatcgagtctgaacaggaattaagaataactcaaagtgaatttgatcgtcaagcagagattaccagacttctgctagag

SEQ ID NO: 883872 - DNA, 99 bp, Homo sapiens
gtgcatcatggggcaggatggcaccagccttggccctccctatcctgaagacattagctgagagtctggcaccttttaaaggtctgatcatcaattgtc

SEQ ID NO: 883873 - DNA, 98 bp, Homo sapiens
gaagacccagaagatgacatatgcaaatgcgaattggactgcactctggatcagtttttgctggcgtcgttggagttaaaatgccccgttactgtctt

SEQ ID NO: 883874 - DNA, 99 bp, Homo sapiens
tttgaaccaaactgtctacggaggcggccatctgatgaggagactctgcacattgatgaggatgatagaccagaactggtatggtggaagtgtaagaag

SEQ ID NO: 883875 - DNA, 98 bp, Homo sapiens
gaaagtgaggaattttgaagtacaccgtggtgacattgtatcattggtggttcactgtttccactatcttatccctcttgcaaaggaggggaactatg

SEQ ID NO: 883876 - DNA, 98 bp, Homo sapiens
tgataatgaaaagatggctgccctggaggccaaaatctgtcatcaaattgagccctgactgccgccgcaggaagagggaagctggaggtctgtgagct

SEQ ID NO: 883877 - DNA, 75 bp, Homo sapiens
gctgcgcagctgccaggactccctgaccctgtccctcctgaagggttgagaatgcttgcaccaagcttgtccagg

SEQ ID NO: 883878 - DNA, 76 bp, Homo sapiens
cgtgggcgctcggtgcccgggccgggcagctggatagaacttatactggcttgcagactcttggagcagagacggt

SEQ ID NO: 883879 - DNA, 98 bp, Homo sapiens
gctcatcagagggaagatctttttcctcaattggttggtactaagaagtgcctttcctgacgtctctgctgcttggaaccgcttctagagcagtctct

SEQ ID NO: 883880 - DNA, 99 bp, Homo sapiens
aacaactcgggcgccgacgagatcgggtgaacttcacggtagaccagatccgcgccatcatggacaagaaggccaacatccgcaacatgtctgtcatcg

SEQ ID NO: 883881 - DNA, 98 bp, Homo sapiens
acaaggcgtgatcctaatgtcacagatgacgagttccagttattacagagaaatttcatggacaagtactacctggagtttgaagacacagaagagaa

SEQ ID NO: 883882 - DNA, 98 bp, Homo sapiens
aaggcggctttagtggcagcatgaagcgcaccccgactgccgaggaacgagagcgcgaagctaagagccctcatcctgcaagtctctcggaaacacct

SEQ ID NO: 883883 - DNA, 75 bp, Homo sapiens
ccaggggaacatcactcagaagtttgatgtagtataagtgtgctagcggagtgtctagattgtcctgaattgaaa

SEQ ID NO: 883884 - DNA, 98 bp, Homo sapiens
cacgctggccggacagggccgcctgtcgccgggaacaagatcactcaaggtgaaggataatctactaataccagcactttgaatgaaaatttgtttct

SEQ ID NO: 883885 - DNA, 99 bp, Homo sapiens
ggggccgtgtctcagtccacccaaggtctcctcggatcgcctggagaggcactcggacctggtcactcctggaagcaaggcggctctagctaatttatg

SEQ ID NO: 883886 - DNA, 76 bp, Homo sapiens
ccgttgactaccgtggagagatcataatttggggttcaagattccagcttcgcctcaacagcatcaagaagctgtc

SEQ ID NO: 883887 - DNA, 99 bp, Homo sapiens
tattggaaaaacctcaaaatatgatggtggttggacagtcagcatttgcagactttgtttgcttcagtgtccccaacagttcctgaattcttgaaaact

SEQ ID NO: 883888 - DNA, 99 bp, Homo sapiens
gcgggaccgcggggaccatggcggagccgcctcgggcgagtctgcggacaccagaactgacctgggagcgagtgagatctcaagttgaccatgtgatat

SEQ ID NO: 883889 - DNA, 98 bp, Homo sapiens
tggcgtccccggtgcccagcattctgcggggcaggcgtgcaagtggtgacccaggatgaaagagagcagctgtacacacctgcttccttaaaatgctc

SEQ ID NO: 883890 - DNA, 72 bp, Homo sapiens
atcatcagagcatgtcacagatctatggactcattcatggtgacctcaggtagatgaaactcaagagaaaag

SEQ ID NO: 883891 - DNA, 98 bp, Homo sapiens
aggactctaattatccacagaccagactgagaactatgagcagagaatacgtgaacaacaggaacagctgtcacttcaacagactattattgacaagc

SEQ ID NO: 883892 - DNA, 99 bp, Homo sapiens
acactgaagatgaagcaaggcccaatgacccaggcggtttgttcggacagtgttaccattttctcaggaatttcaaagagataagcagcctaatgcaca

SEQ ID NO: 883893 - DNA, 99 bp, Homo sapiens
cggctactgcaagaacgagtcgggcagccgctccaatggtgaagtggatcctaaagagaggatagcacgccaacgaaaattattacagaagaaacttgg

SEQ ID NO: 883894 - DNA, 76 bp, Homo sapiens
gtttttgattcaagtcctgttctacctactgccaattggaaaggaggttcagcaacatcagatgaccatgaatttg

SEQ ID NO: 883895 - DNA, 75 bp, Homo sapiens
aaaagacagtcctcgtcagcactgactttcagctatggaatcgtctgcatgaagaaatcagtgatttttatgaat

SEQ ID NO: 883896 - DNA, 75 bp, Homo sapiens
ttcagaagagccaaggaataaacatgcaatgaacccaaaagggtgcgacacatgattgcagatgggatgattcac

SEQ ID NO: 883897 - DNA, 99 bp, Homo sapiens
tgatggcatctttactaaaagaccttgcagaaataggaattgctgtgggaaataatgatgtaaagggcattcttcttgagcaccgagaaaaagaatttg

SEQ ID NO: 883898 - DNA, 75 bp, Homo sapiens
cccgggcccggccgccaggcgcctctactccaggcgcatattaaatttcctattgactacccctattcaccacct

SEQ ID NO: 883899 - DNA, 98 bp, Homo sapiens
ttcactcgagagatgaggacactgaaattcagagaggggaagtgatttgcctcagcttgtactcattatctgcataccagaggtactacagtttacag

SEQ ID NO: 883900 - DNA, 98 bp, Homo sapiens
gtttgttcaggaaccaccagtgacagaacgttggaacttgccaggaatccagcaatgatgcaggagatgatgaggaaccaggaccgagctttgagcaa

SEQ ID NO: 883901 - DNA, 98 bp, Homo sapiens
tttttcctaatggaaaatcacatacctttccatttcagatacaccacctccaccgccacctgtggaagaaccagtctttgatgagtctcccccacctc

SEQ ID NO: 883902 - DNA, 98 bp, Homo sapiens
tgacgaggacgaagtgtccgagaaacaaatcattgtggaccccttgagcttcagcgaggagcgctttaggccttccctggaggagcgtctggaaagca

SEQ ID NO: 883903 - DNA, 99 bp, Homo sapiens
agccgctggcagccgcggatctcaccgccgctcaggcaactcttatctaaatgcccctggaaggaatacaaatcagattctggaaagccttactattat

SEQ ID NO: 883904 - DNA, 98 bp, Homo sapiens
gctgggagccgcaccacctaacgctggccgacaacagcctggcgtccgccacggatggctacttttctcatcggccgaaagagaaagtgcgaacagac

SEQ ID NO: 883905 - DNA, 98 bp, Homo sapiens
cagtcctgacaatgggcagaacgaattcagtgatatcattaagtccagatctggtctgacggtaactgctgtaaaagactcaggagaatggaatttgg

SEQ ID NO: 883906 - DNA, 98 bp, Homo sapiens
gaagctcatccgcaaggtgtccacgtcgggtcagatccgacagaagcatgccaatgaagatgtggaaagaatgttactaggaaacaagtgtgatatgg

SEQ ID NO: 883907 - DNA, 99 bp, Homo sapiens
ctttgctgtctttcctcgcggagacaggtccctccttgtggtccatttctgggcaccatgggctccacagtgtgcacagatgaacgaagttatggcaga

SEQ ID NO: 883908 - DNA, 98 bp, Homo sapiens
tctgatgagcacagatctcttagcaaacagttcggatccagatttcatgtatgaactgtcttcagccaatgacttgcttgcatcagacatctttgctc

SEQ ID NO: 883909 - DNA, 99 bp, Homo sapiens
aaagtatgttgtaccttgtgacagaatatgccaaaaatggagaaatttttggtgccaaagatgtacaatgggaatttgtacatggtttacttgaaaatg

SEQ ID NO: 883910 - DNA, 99 bp, Homo sapiens
tatgaagagacatgcgatggtagatcaacccccaggtaaaagtacacctgtaagccagcttggttccgcagactttcccgaggcccccgatccattcca

SEQ ID NO: 883911 - DNA, 99 bp, Homo sapiens
gtcccgccagcgccgtgacgtggactacagtgacgccctcacggagaagcagtggctaaggatgcagaatcctgatacactatcagcaatgtcaaaccc

SEQ ID NO: 883912 - DNA, 99 bp, Homo sapiens
gacaatgaaaccgggaggaaagaagacaagagagaacgcaaacagtttgaagctgaggattttgtgacagatcagtcagtgaaagcatttgctgaacac

SEQ ID NO: 883913 - DNA, 99 bp, Homo sapiens
gatgatgtcaggagggcagcagtagaatcacttgggttcattctattcagaggtaccaatcttgggaaaaagaagcaacacatttgtcatataccagga

SEQ ID NO: 883914 - DNA, 99 bp, Homo sapiens
actctggcatctctgccgaggctgctggaatcgactggggcatcttcccggaatcagattcaaagtttgccatctcttggagcaagagcgacaacaaca

SEQ ID NO: 883915 - DNA, 98 bp, Homo sapiens
gagtcggcggctgatttagaaggaggttcaggctacggtgagccgaaggagaggcaagagaaagctctgggcatcctgacatacctgggccagagtgc

SEQ ID NO: 883916 - DNA, 98 bp, Homo sapiens
tatgccacacttctgcctgctgttggcaaccctcctggactaggctgctcttgttaatcacatggatgttgtgattaaagtatacagtgaagatgaaa

SEQ ID NO: 883917 - DNA, 76 bp, Homo sapiens
gggcagccccgcgccctggccagtctcctgaatatttacgcgttgctgaatctcctgtggacaaaccaccaatagg

SEQ ID NO: 883918 - DNA, 99 bp, Homo sapiens
ggcagagttgttatttttcagcgtgaacaagagacagcccacctgaggatattgaccataaggactcatatctcattacaagaagcatcatggccgagc

SEQ ID NO: 883919 - DNA, 99 bp, Homo sapiens
ggagggcgggcgcagtcgggctctgcaggagcgcgcggaggacaaccttaaacttccaccacaagaggaatataaagaggtccctcctgcaccaagaaa

SEQ ID NO: 883920 - DNA, 99 bp, Homo sapiens
ctcagtgggactagttcgaactatgtggaggagatgtactgtgcttggctggaaaaccccaaaagtgtacataagaaaacgttgtgtgacgtgatcctc

SEQ ID NO: 883921 - DNA, 99 bp, Homo sapiens
ctaaagcaaattaaaaacaggatgaaaaagactgattggctcttcctcaatgcttgtgtgggtcaatttttctgtggaaataaatattgtgataaaaaa

SEQ ID NO: 883922 - DNA, 98 bp, Homo sapiens
agagccggaggcgggaggacgggctgccgcagggtaaaccagacttgaatacaacattgccaattagacaaacagcatcaattttcaaacaaccggta

SEQ ID NO: 883923 - DNA, 99 bp, Homo sapiens
cactccagtgaaaatggaaattctgggcaagaaagatattgaaacaaccaccatttcaaattttcacactcagacctacctggtggttctgtgccttcc

SEQ ID NO: 883924 - DNA, 98 bp, Homo sapiens
ccgggccctcttcgacagctacacaaatctggaacgggtggccgattactgcgagaacaactacatacaggttctaaatgagaagaaacttcaagagg

SEQ ID NO: 883925 - DNA, 99 bp, Homo sapiens
aactacctgcagcgggcctacatcaaggagagacagcgtctggagaccatcctcagtctctgtgctgaatacacaaagcctgacagtcgcttatctact

SEQ ID NO: 883926 - DNA, 99 bp, Homo sapiens
gctaggaaaagacaagctttccagagaatgtttcagagaaagttacgtggagcgtgggcgtttcgcagactcctaagtttcaggatctgaagctgaggg

SEQ ID NO: 883927 - DNA, 76 bp, Homo sapiens
atgcagctgctgctgaccctggccttcaaccccgagccgctggtgctacaggcaacatttcatttgttgcatttcc

SEQ ID NO: 883928 - DNA, 98 bp, Homo sapiens
cggagacgtgggcgccctccccgccaaggcccgtgcgaggtccatccaagctgaatgatcgcgctgactcaagaagaagcctttgggaccaaggaaac

SEQ ID NO: 883929 - DNA, 99 bp, Homo sapiens
gaagtccaagtcaaacgcagaaggactgcctcactgagcaaccaagagtctctctgcaatgcaatcaatgtttacaacctcacctgcaataactgttca

SEQ ID NO: 883930 - DNA, 98 bp, Homo sapiens
cagagcctacggttacttggagacacatctctcccaaagatcttcaaagctgctgcgggcattctatgtccccttcctgtcagatcagtatacagtgt

SEQ ID NO: 883931 - DNA, 76 bp, Homo sapiens
gcgccctcaacctgctttacaccatacagatccacgggttttagaaaaacaagaattacagcagccaacctatgtt

SEQ ID NO: 883932 - DNA, 99 bp, Homo sapiens
ttaaagtctttgcagactacgaagcctatgtcaagtgtcaagataaagtgagtcagctgtacatgcgtttagtcacatcaagaaatagaacagaattca

SEQ ID NO: 883933 - DNA, 99 bp, Homo sapiens
tgtgcttcttgggcgtcgttgtcaccatcgtctccgccttccagttcggagaggtactaggttttgacaagcttgcatcatgcgtgagtataagctagt

SEQ ID NO: 883934 - DNA, 99 bp, Homo sapiens
cgaggagaaccaactggtcccgaaagagagactctccaacatgtgccttctgaccatacaaatgaaacttccaacagtactgtgaaaccaccaacttca

SEQ ID NO: 883935 - DNA, 98 bp, Homo sapiens
tgtaatcaggttgtcaaaccgcaggcatttcaatcacattatgaactgcctgctggttgggaaaagattgaagaccctgtctatggtatctactatgt

SEQ ID NO: 883936 - DNA, 100 bp, Homo sapiens
caccgccatcgaggcacagcacttgctcaagaggaaaccaggaggaatatcagggcgaggggatcacgtggcacaacatcggctacacagacaatgtcgg

SEQ ID NO: 883937 - DNA, 99 bp, Homo sapiens
ggcaaggtcttctacattgaccacaacaccaggaggaccagctggatcgacccccgggacagccaaggacccttgtcatccattagagcggtaatcaag

SEQ ID NO: 883938 - DNA, 99 bp, Homo sapiens
tccattgtttgaccacaacaagggccggattctcacccaggtatttaccttgctgtggattgctgactggatggtccatcacttctggaggaaaggaaa

SEQ ID NO: 883939 - DNA, 98 bp, Homo sapiens
ttatcttcaggagcgaagagctgcttctgtatcttaagcaccgaacaagatttgtgatgaaatggagcctggaacaaactcttttcgggtagaatttc

SEQ ID NO: 883940 - DNA, 98 bp, Homo sapiens
cattatccccagcaaaaagctccgcaacaagatagcaggcaaattgccatcgcaagagagggggacctgctgacaaaggagcgcctctgctgcggcct

SEQ ID NO: 883941 - DNA, 76 bp, Homo sapiens
agaaagaggtgatagatgccctcagagtgaacaacaaccagcagaatgccgcggttttgggtctagtaatactggt

SEQ ID NO: 883942 - DNA, 98 bp, Homo sapiens
cggtggtgccttcgctcgtggatcgatacttcactcgctggtacaaaccggacctcggaagagatatttcaacacctgcagaacatagtggactttgg

SEQ ID NO: 883943 - DNA, 98 bp, Homo sapiens
gacaaaccaattgctccttgtggagctattgccaacagcatgtttaatggtttgtactacagaaagtgccagttaatttccaaggaagatgttactca

SEQ ID NO: 883944 - DNA, 98 bp, Homo sapiens
ggggccaggaagcaattctggaagcgcagcaacagcaagctcccgggcaggtttgtctacagattttgagcgttcgaagttgacccctgactaagtat

SEQ ID NO: 883945 - DNA, 98 bp, Homo sapiens
ctgaaggagttgttgtctcggcagcgcccgcggagacgtgaagaggattaacacagattcctcagatccagaagactgaaatttcctttcgtcctaat

SEQ ID NO: 883946 - DNA, 74 bp, Homo sapiens
ctgtgcaggcataatgtcaggcaagagagatgcctgcaaaaagcctaaagaaactgttccaactcttgctccaa

SEQ ID NO: 883947 - DNA, 99 bp, Homo sapiens
ataaacatgcaatgaacccaaaaggtatgtgggtgccccggtggcttatgtccagcagatatttgtgaagtcctcagtgtttccctggcacaagaacct

SEQ ID NO: 883948 - DNA, 98 bp, Homo sapiens
tctacccctgtggcaatgcctgcactattgatgggctccctgtccggcagcctacccggctcactcagggattatggccactgcggtctgaccctaat

SEQ ID NO: 883949 - DNA, 76 bp, Homo sapiens
gtccaggcagcattaaaacttaagcaggtacagaactggaacagtgaaattcttgctaagcaaaaacctcttattg

SEQ ID NO: 883950 - DNA, 98 bp, Homo sapiens
ccatcaccacttcctcctctcgaatgcagcagccacagatctctgtctacagtggttcagaccgacatgctgtacagattgagaggatccagaatcca

SEQ ID NO: 883951 - DNA, 98 bp, Homo sapiens
agggtctggaggagccttctcaagaacagagtgttatctacaaacttctggcatcgaaaagtgaaggaatcagggtacaagctcttaaggcaatgggt

SEQ ID NO: 883952 - DNA, 76 bp, Homo sapiens
gcaaaatcgagcgggccattgagtcatctggggaacgtgttagtagatatgaagctcattgacatcaaggacacac

SEQ ID NO: 883953 - DNA, 99 bp, Homo sapiens
gggtgattaccctgtgtataagagtatgtgtctcactgcaccttcaatggcattgagtaggttattgacccagtggctccacgatatgttgcattactg

SEQ ID NO: 883954 - DNA, 76 bp, Homo sapiens
cactccgccgccaaactggaggagcgacggaagccagaccccaggaggaaaatgtttataggaggccttagctggg

SEQ ID NO: 883955 - DNA, 99 bp, Homo sapiens
gaaaaatggggcagaagaagagcagaaaatagcagccaggaaccaagaaaacttgagacagatgggaccgtgttcagaattcacacaaaagctgaagga

SEQ ID NO: 883956 - DNA, 98 bp, Homo sapiens
agatgatgatatccttctcaaccttgtgggatgtgaaaactctgttactgaagggaaaatggtatcatcggaggcaagctgtaaaagaattacatagt

SEQ ID NO: 883957 - DNA, 99 bp, Homo sapiens
aattccttgcattcctggaaaaatcaatgtggatcgacgtggaaatattgtctatattcacataaggagtctactcttcatcttgtgttgagacttcgt

SEQ ID NO: 883958 - DNA, 98 bp, Homo sapiens
tgatacccggatgtgaggcgatccgctggcgctagtctgaccctccgccaggcaaaaggaaggttggtttgttggaccttgaactcaatcggctgacg

SEQ ID NO: 883959 - DNA, 99 bp, Homo sapiens
tgattaccatggcgaggagtctctgtccgggggcctggctaaggaaaccctattacctccagttcacagaagaaaagcttggccaggctgagaagacag

SEQ ID NO: 883960 - DNA, 98 bp, Homo sapiens
tggacatctgctgccggaaggggtcccgaagccccctgcaggaactctacaacccaatccagatgctggttgccaacattgacttgggtcctactatt

SEQ ID NO: 883961 - DNA, 99 bp, Homo sapiens
attggtctaaagtctttccaaaaggtcaaggttcacaaggtgcattggatcgttgtgtgatggggataacagcagttgagattctaaacgcttgtgatg

SEQ ID NO: 883962 - DNA, 99 bp, Homo sapiens
gttcttccaccttcctttccagtttgtggagaaaaacagcgctttgagaagttgatggaacatttcaggaatgaagacaataacatagattttatggtg

SEQ ID NO: 883963 - DNA, 98 bp, Homo sapiens
cccgatgaagaggaagaagaccacatagataagaagtattttcccttgacagcttctgagttagtgtgactctggatccagatacagctcatcacgaa

SEQ ID NO: 883964 - DNA, 99 bp, Homo sapiens
gaaagtggacaaagagaggagtcaggtgaatcagctcccggccgactttaggattcttctggattttaaattttttctttttaaaaaaacttggacgga

SEQ ID NO: 883965 - DNA, 76 bp, Homo sapiens
gtagcttgcagcagcagttctccaggtgtaactgtgtggaaccgcataatcccagcaatggcacattgaaggaatg

SEQ ID NO: 883966 - DNA, 98 bp, Homo sapiens
cagggtgggcgcctttcgccgtggacgccgaccgtccgggacgaggattttttatcaagcagaaatgcatcgaacaacgagaatcaagatcactgagc

SEQ ID NO: 883967 - DNA, 75 bp, Homo sapiens
gatgattttacatccattattgggaaatgtcaagttcggcaagacccattgcttgggagcagcgagactttcaac

SEQ ID NO: 883968 - DNA, 98 bp, Homo sapiens
aagaaagtgatcataggagaaaaccatttcaggaagccttatcagttgtgagtgaggaccagtcgttgtttgagtgtgcctacggaacgccacacctg

SEQ ID NO: 883969 - DNA, 98 bp, Homo sapiens
tcgaggctttttttctccagccgagaggacgcggctgtgatatacgaagattgaaaaggccaaacctattaaatgtggaacatttggtgcaacatctt

SEQ ID NO: 883970 - DNA, 99 bp, Homo sapiens
ttgcagccgagaacgagctcaaccaggcttgcagccaatttactggagcagggatgacgtagcccagtggctcaagtgggctgaaaatgagttttcttt

SEQ ID NO: 883971 - DNA, 76 bp, Homo sapiens
caagaaagaaatggccatcaatgactgcagcaaagcaacatctgaatgaattgatgacgaagaagtggctattagg

SEQ ID NO: 883972 - DNA, 100 bp, Homo sapiens
tggcgtggccatgccggcggccctcacagcaaccagcaccagatgaaggagcattcctcttgggttaccatcccaccatttcatgaccctttgaaaaaag

SEQ ID NO: 883973 - DNA, 76 bp, Homo sapiens
gaaagatgacaccacctttgatgaggaatctttgtgacattctctctcagcattctttatcccctgtttgctgaag

SEQ ID NO: 883974 - DNA, 99 bp, Homo sapiens
cgagcgccgcgcgtcccgagcatggcaggctccctgcctccctgcgtggtggactgtggcaccggcagtagaagactcagaaagtggtgtttacatgcg

SEQ ID NO: 883975 - DNA, 99 bp, Homo sapiens
cgacggcggcctacgagcagctgaagctgcagttgcagtggtgcagaatggctgacctcagtcttgcagatgcattaacagaaccatctccagacattg

SEQ ID NO: 883976 - DNA, 98 bp, Homo sapiens
aagggggagagctatttcacagaatcagccagcaccggcactttacagagaagcaagccagccaagtaacaaagcagaacatcatcaagaaggtgatc

SEQ ID NO: 883977 - DNA, 98 bp, Homo sapiens
gccgcccggccaagctatcttctcgctagcagatggtcatcatgggccagtgctactacaacgagaccatcggcttcttctataacaacagtggcaaa

SEQ ID NO: 883978 - DNA, 99 bp, Homo sapiens
tcagatccagtgataattgacagtacctggagtagaacagaaaaattattatgtctgtgttcccttgggactcattggaaattgtacagtgacatcttc

SEQ ID NO: 883979 - DNA, 98 bp, Homo sapiens
tctcaagtactaccggccaactgaagtggtactgaaatttgatgcctatttccaagaagatgttcctatgtcaactgaggaacagtataggatccgtc

SEQ ID NO: 883980 - DNA, 99 bp, Homo sapiens
aacccagaattcaaacagatatactaaagcaggctaccaaggacagagtcagtgatttccataaattgaagcaaagttaaaaatctgtaagagcctgat

SEQ ID NO: 883981 - DNA, 99 bp, Homo sapiens
tacagcttattaaagacaactgggaagacagacaagtaattgttgaaatcctggaggctggaagtgcaaaaggaaggtgtcggcaagatcgtttttttc

SEQ ID NO: 883982 - DNA, 99 bp, Homo sapiens
ttcggaggattgctcaacaaccatgctgggcatctggaccctcctacctctgcttggtgtaaaaattgccaaagcagttgcctgccacaactttgtaaa

SEQ ID NO: 883983 - DNA, 50 bp, Homo sapiens
gttgaatccttgcagcactaaaatttgtttgactgcaaccctggagtacg

SEQ ID NO: 883984 - DNA, 100 bp, Homo sapiens
gtgtgcccaccacccccacatcatccgtctcacccccacaggaggccaggttggaaaggttactcctggatggagcacctctgatagcaatccacaaagc

SEQ ID NO: 883985 - DNA, 75 bp, Homo sapiens
agctccagatggcgtcttccgtgggcaacgtggccgacagcacaggatttgctttcccatatgcttcatatggac

SEQ ID NO: 883986 - DNA, 75 bp, Homo sapiens
cgacgtcttgcctgtgtcccacttgttcgcggcctatagaatgaaaaatctactactcccgtctcaaagtccaat

SEQ ID NO: 883987 - DNA, 99 bp, Homo sapiens
gaaaagagcaaatgcagcatttttgataggtgcctatgcagcacgcttaaaaaggcctcttaagagccttgatggtgctctatatgatgatgaagatga

SEQ ID NO: 883988 - DNA, 99 bp, Homo sapiens
tcttgattatgatagttcagatgacagtgattttaaagttggagatgcctcaggtgaaatgctaccacaagaaataccgctcggccacccgtgacgtca

SEQ ID NO: 883989 - DNA, 99 bp, Homo sapiens
ttggattcagcatcaaaatacatctactcatattgagagctgtcgacagttacgtcaacaatcttagcaaagcaatgtctcaagatggtgcttctcagt

SEQ ID NO: 883990 - DNA, 75 bp, Homo sapiens
taggagattctggctcaattattagtcggacagcaaaagttgcagtagcagctccatcaagtatgatggtgaagg

SEQ ID NO: 883991 - DNA, 98 bp, Homo sapiens
tggacctgattgggtaactgtgattcccaggagaataaaaggatcagctcagctactatttaataaaacaaaatctgtagaattcacgttttgtaatg

SEQ ID NO: 883992 - DNA, 75 bp, Homo sapiens
tatgtataaaagtttatttgaagccagccaacagcttcttaatgaaatgaaatatctcctaagaagattgtctaa

SEQ ID NO: 883993 - DNA, 99 bp, Homo sapiens
actagtgaacatgtaataatgcagaatgaagctcttgttgctttggcattaatagcagctttagaattgggggtggcactgaatcaacaagacaagcaa

SEQ ID NO: 883994 - DNA, 98 bp, Homo sapiens
tgcttgctcagctcagtatcaacacttatgggggacttgatctcatcttcatgccaggccttgggtttgacaaacatggcaaccgactggggaggggc

SEQ ID NO: 883995 - DNA, 99 bp, Homo sapiens
gaacctgaaaaattcaagaagttgaaaaacgcttttcacgtcacctggagagatgcacagtgtaaacaggaacatcgataagtagtgtaaaaacttgca

SEQ ID NO: 883996 - DNA, 98 bp, Homo sapiens
ttctggttgcagaatgcgaagtctgtggtttatcattgtaatcagcttcttaccaaatacagaagggttgaaaggaggagcaggaggtactgatggac

SEQ ID NO: 883997 - DNA, 99 bp, Homo sapiens
gcgaagatccggactctgggtgttttgctaccgtgaccgtttaggagaaggaagccaacatccttttggagccatgaatattgtccgaactccatctgt

SEQ ID NO: 883998 - DNA, 98 bp, Homo sapiens
actgaagtatctgcccctgtcaaatcattccaggtggccttgggggacttgcaggtctgagtagcttgggtttgaatactaccaacttctctgaacta

SEQ ID NO: 883999 - DNA, 99 bp, Homo sapiens
gtgggtgcaaggacggcagatggcatccctgagaggtggtgactgagactagatgcgggtgcaggtttggcttgagcaacaagtttgatactgaatttc

SEQ ID NO: 884000 - DNA, 99 bp, Homo sapiens
tcgaatgagaaaccagtcccttggacagtctgcaccttctcttactgctggcctggagtccaatgtgctgattgctgctaacagtcagggtacaattaa

SEQ ID NO: 884001 - DNA, 98 bp, Homo sapiens
gaagatccggactctgggtgttttgctaccgtgaccgtttagcttcggggagttttgcctggctcacctgttactgaagaggaaccctgtcatgttct

SEQ ID NO: 884002 - DNA, 98 bp, Homo sapiens
tacagaaagagtcaacagcagtggcaacaggaagaagaggaggggtcagaagacgatagcaatgtgaagccagacttcatggtcactctgaaaaccga

SEQ ID NO: 884003 - DNA, 76 bp, Homo sapiens
ctgaagatggtttgaaacagcttcacaagggaatcggatctcttcctgctcgacagccgtaccctctgggcctcgg

SEQ ID NO: 884004 - DNA, 99 bp, Homo sapiens
ccggggccggggctgcggggcgagataagaccatcatcatgtggaaactgaccagggatgagaccaactatggaattccacagcgtgctctgcggggtc

SEQ ID NO: 884005 - DNA, 99 bp, Homo sapiens
tcgtggcgtcgtctgcgaccgctgccttctcggggaagaggaagaacgtctgagaaataaaattcgagctgatcatgagaaggccttggaagaagcaaa

SEQ ID NO: 884006 - DNA, 99 bp, Homo sapiens
ggaaagtggaaattacaacagagactattaaattgcaacaggattcagaaatcatggaaagcagaaacatgattcccgtgacagaattccggcagttct

SEQ ID NO: 884007 - DNA, 99 bp, Homo sapiens
agatcctggacctatgaatatccagtttgagccatcggatctaagatccaaaagagcctggagaaagttcttgtggaattcagtcacaaggagttgttt

SEQ ID NO: 884008 - DNA, 99 bp, Homo sapiens
gacatgaaaaaaatgcattatgtggaccctgaccatgtaaaggctgaagggtatgtgattggcagctgtattaaacacattccaatcgcaggacgagat

SEQ ID NO: 884009 - DNA, 98 bp, Homo sapiens
gtgacggtgcaggccggagcggcacctacgtcctgatcgacatggttctcaacaagatggccaaagccgatacggaagatgtgtgcattgtagagaga

SEQ ID NO: 884010 - DNA, 98 bp, Homo sapiens
ctctgcgctggccgggggcgcgggcggcggcgccggcaggaagatcgtcagtatttaaacagatcacatcatgcgtgagtacaagctagtggtccttg

SEQ ID NO: 884011 - DNA, 99 bp, Homo sapiens
tatttgtatcactactgtgttgtggatccccaggagggaagcagtgctcttaaaacattggaaatgaatccttgtaccccaaataatgttgaggttctg

SEQ ID NO: 884012 - DNA, 98 bp, Homo sapiens
cgccgccggccgggcatgagttagtcgcagacatggacaccaaacatttcctgccgctcgagtgaagatagtccaagtcctaagagacagcgcctctc

SEQ ID NO: 884013 - DNA, 98 bp, Homo sapiens
cccgcccagttggcccagaggatctcttctaacatccagaagatcacacagtgttctcttttggtacaccagaaggccagaatggaacgacttcaaag

SEQ ID NO: 884014 - DNA, 99 bp, Homo sapiens
ctctaccgcacaggcaaatcctacctgatgaacaagctggctggaaagaaaaaggggccattttgagtgccagatctagttattttgctgcaatgctga

SEQ ID NO: 884015 - DNA, 99 bp, Homo sapiens
agaggttacgagcaaagggaataaggaatccggatcattctagagctttaagtgtacagagccagtgggccggatggagccactggcagaggccagaga

SEQ ID NO: 884016 - DNA, 98 bp, Homo sapiens
gcgcctcttcgccgtcatccgcttcgaaagcatcatccacgagttcgacccgtgaattcagaaggagctggcggacatcactttagaccctccaccta

SEQ ID NO: 884017 - DNA, 98 bp, Homo sapiens
agaggatccaggaggaggagttgcagagatttgtgacattatttccaaatgggaacaggcttccaaagaacagcagcctggaaaatgtgaaggtacaa

SEQ ID NO: 884018 - DNA, 98 bp, Homo sapiens
gagattgacagtcacaattttgtaataagtgttatccaagataaattctgtgggattataaacatttcagtagaaggcctgcatgatgtcatgacgga

SEQ ID NO: 884019 - DNA, 99 bp, Homo sapiens
ccgtagtaaccccgagtctgcggaagtggtgacccgtgggacgcggctgagacaggcttcgggagcaggaaagaaaagaagcagaagaagctagtcaaa

SEQ ID NO: 884020 - DNA, 98 bp, Homo sapiens
tataatctctttgcagtgaacggcattctcttcaatcatgagagtcccagaagaggacatgtctcaggaaggctatggaactagatctcaacctcctc

SEQ ID NO: 884021 - DNA, 99 bp, Homo sapiens
tctagatgccctcaactatgctctccgctgtgtccacagcgttcaaggtcgggacttctctcatgatgacactttggatgttccaacgcaagttgagct

SEQ ID NO: 884022 - DNA, 99 bp, Homo sapiens
agaccatgctggccggggtgcagtaccccagctccatcaacctcacgctgcacctggatgaccagctgaactcagaagaaaaaaagaagagaaagcagc

SEQ ID NO: 884023 - DNA, 76 bp, Homo sapiens
caaagaaacaaccaggtcagcttcggacaaggttagcagaggctcgtatacatccatttcatattttgatcgcatt

SEQ ID NO: 884024 - DNA, 99 bp, Homo sapiens
tggacttggtgtgcattaacctgccgccgcccctcaccagacagatcgctgtcaaaaccctaggttgctccgactgtgtgttccaggagtggtggctct

SEQ ID NO: 884025 - DNA, 99 bp, Homo sapiens
acagcgctggcgcgagcccacgaagaggtacgattccggagaatcgcgaggcagagcgggagcgcgcagccagtacggcaagaagaagctgaaatacct

SEQ ID NO: 884026 - DNA, 98 bp, Homo sapiens
taccacctctgatgcctggaatgccaccagatttgtttagtgaatgaccctaggccccagcacaagtacaacaaactttacacagtggaatacttaag

SEQ ID NO: 884027 - DNA, 98 bp, Homo sapiens
gttgcttttggtgtacagggtctgggatgggtgtacgaaggaagcaaggtactgaagatttaccccccaaaaaaaattgtcaatgagaaataaagcta

SEQ ID NO: 884028 - DNA, 99 bp, Homo sapiens
ctgcctcttggccgtcacgcaagattctgtttctggcgtctgcatacgcaagtccccaactcgctgaggagagctgttcagctatggctgctgtcacac

SEQ ID NO: 884029 - DNA, 99 bp, Homo sapiens
attacaatcgcttgtacaaaggagagtttaaacagccaaaacagttcattcatattcagcgtctccttgaagaaaatgatattttcaggaatgctcaag

SEQ ID NO: 884030 - DNA, 98 bp, Homo sapiens
tgactaccagtggctctgcagagaggcaaggaactgctccaccgccaatgaaacttcctcctccttataaagctctgactgatgacagtgatgaaaat

SEQ ID NO: 884031 - DNA, 99 bp, Homo sapiens
tggactgcagcctcggcggtcagcagatgtggtgaagctgtagagaaaaacaagcgtctcatcacggcagaccagagggaatatcagcaggaactcaaa

SEQ ID NO: 884032 - DNA, 99 bp, Homo sapiens
agagggaaacattcactgcacagaaccggttacaattcaacaaacatggtgtgttgcgggtagaaggcttcttaacaccaaacaagtatgacaatgaag

SEQ ID NO: 884033 - DNA, 98 bp, Homo sapiens
accttgtcccgctgcagccgagatgccgggggagcggggccttccacaccccctccgtgggtgtgtgatccagatgcagaggtgtgccttcatgtact

SEQ ID NO: 884034 - DNA, 99 bp, Homo sapiens
agtgcaaaggcatgtgaccatgtccaccaacaacaggaaagaacatgaggttcccttggaaatcattcaagaggaagatggaaggggctgtttagaaga

SEQ ID NO: 884035 - DNA, 99 bp, Homo sapiens
gaactggaatctggatgagcagctcaagcagacagccgctcaggaagcaatcttgcatgcgtctggaaatggcacaaccaaggactactgcatgcttta

SEQ ID NO: 884036 - DNA, 98 bp, Homo sapiens
cagtcttgaggctctcactagaaaagtccacaacttccagcggtgaaggagacctgtgcttggttcactgacaactacgagcaggcccggaagtgaag

SEQ ID NO: 884037 - DNA, 99 bp, Homo sapiens
atcaatcttaccagagggccctcagctggcgctacgtacatctttgggaaaagtggtgggcttatcctctacacctggccagccaatgacaggcccagc

SEQ ID NO: 884038 - DNA, 76 bp, Homo sapiens
gtgaagtgctccgccgcccttgcctccagtactttgccagacgtttatcaaaatggggctgctgtcttctttcact

SEQ ID NO: 884039 - DNA, 99 bp, Homo sapiens
aacttcctgctctcccacccacgcctcagcaacagccacccttgaataatcacatgatctcacagaagcccctgaatgtgacagtgatccgcagggggg

SEQ ID NO: 884040 - DNA, 98 bp, Homo sapiens
tcaacttcaatttttctgcagtggctctgggtccagccccttacttaaagttgcctttccccatcttcctggttctgctccttcgtggcctagtcttg

SEQ ID NO: 884041 - DNA, 100 bp, Homo sapiens
gttgccattgggtcggagatacagatctcgaggaagttctcgtcctgacagatctccagctattgaagggtgcaaatatatacagagcttcataatcagc

SEQ ID NO: 884042 - DNA, 76 bp, Homo sapiens
aaattttgtgaagacattggtgttgaaccagaaaacgtcatcctcatagaatttttaccaaagacaccgatttttc

SEQ ID NO: 884043 - DNA, 98 bp, Homo sapiens
gacagggaccatcctttcaggctccatcagcctcggtgacagtgtggagatccctgccctcaagatgctgcctggaaacattggccagaaagtaacac

SEQ ID NO: 884044 - DNA, 98 bp, Homo sapiens
tggcggggtgcagaactgagcccaggccacagtaccctattcacgctctgtgcttgtgccaagttacagaatgtctgaaggggacagtgtgggagaat

SEQ ID NO: 884045 - DNA, 98 bp, Homo sapiens
ggggacaggaattgaacctaaagccatgtcccaggttcacgcttacatcatcagctacctgaagaaggagatgccctctgtgtttgggaaggagaaca

SEQ ID NO: 884046 - DNA, 98 bp, Homo sapiens
ccgctcaggtgctgcaggcacagcccgagaaaccgcagcactacacgtggtgcccaaggtaaaggtcctacagagggataccgtgaggcagtgcaaag

SEQ ID NO: 884047 - DNA, 76 bp, Homo sapiens
gtatatttacaaagagaagtttttttggccatccgagttactcatgagaccagtgcccatgaaggtcagactgagg

SEQ ID NO: 884048 - DNA, 98 bp, Homo sapiens
cggcgtctctggccggccttggtgcggcgagccgagcgaggcagctctgagccgcgcggtccctccttgtggtccatttctgggcaccatgggctcca

SEQ ID NO: 884049 - DNA, 99 bp, Homo sapiens
ggcatcctcctgagactccggggtcagacgcccactccaggctactgcagcactggggtgtcagttgttggtccgacccagaacgcttcagttctgctc

SEQ ID NO: 884050 - DNA, 99 bp, Homo sapiens
tgctgtgaagtgcctcttggagcagggagcaaatcctgcatttaggtatttgactacagtcattccttatgagaaaaaaaacggaccaccgtctgttga

SEQ ID NO: 884051 - DNA, 98 bp, Homo sapiens
tgggaccccaggatgttggaaatgattgggaagtccttggtgttcaccaatgtggaaactaaagcccagagagaaagtctgacttgccccacagccag

SEQ ID NO: 884052 - DNA, 100 bp, Homo sapiens
gcagcagccaacttttcacccatctgtacatcctatgtcaactgcttctcaggtagcaagtacatggggagatctgtctatggcagtgcagaaattttcc

SEQ ID NO: 884053 - DNA, 99 bp, Homo sapiens
gaatgttggcagctataacttacacagaagccacagatgatggacataacaacaaccttcttcctcagattattcagtgttttgcatgtccaaattgct

SEQ ID NO: 884054 - DNA, 99 bp, Homo sapiens
gtcaaacctgaaagaccccagttatggatgggaggttattctcgttcaagttaatccaggtgagactttcacaataagagcagaggatggaacacttca

SEQ ID NO: 884055 - DNA, 98 bp, Homo sapiens
tcaattccagggagataactttcgtatcacaaaagcagatgctgctgaattctggagaaagttttttggagacaatataaggatgcatttatgaaagc

SEQ ID NO: 884056 - DNA, 98 bp, Homo sapiens
cagtttgatctcaacaattatgcaactggcggaggcagtgacctcagactctggacggtgaacggggatctcgttggacatgtccactgcagggagat

SEQ ID NO: 884057 - DNA, 99 bp, Homo sapiens
gtgggcacgctggagttcctggtgtcggagctccttcccttaacagagctgagagaggcatctggagctgcagcatggaccagcgagagcccctgcctc

SEQ ID NO: 884058 - DNA, 98 bp, Homo sapiens
acgtgttattgatcttcgctgtaacccaagaacaagttcatttatatgaggggccacctacagatgctcctgcagtggacacagcagaacaagtctat

SEQ ID NO: 884059 - DNA, 99 bp, Homo sapiens
actctaccctggaggagattctggggcagtatcaacggagtctccggggcacgtgtggttctcaaatataggcattctgatgggaacttgtgtgttaaa

SEQ ID NO: 884060 - DNA, 73 bp, Homo sapiens
aatccaagcaataacccaagcaaaacttcagatgcagtctattattagcagaagatttttctgcatagttggc

SEQ ID NO: 884061 - DNA, 76 bp, Homo sapiens
aattcccagaggactttggagaccaggatcggaaactccatggtacagctcagcaactgctccaggacagcaagac

SEQ ID NO: 884062 - DNA, 99 bp, Homo sapiens
catttgtggccttgtgctctttcatcggacttctaatgatatctgtatgcccttggacagaaggtttggaaaagatggaaaaaacgttactttgttcta

SEQ ID NO: 884063 - DNA, 76 bp, Homo sapiens
ccctagaaacagccatgactcaaagaaaactgaggttaagggaagaaagtcggaggctggctttggctgcgaaaag

SEQ ID NO: 884064 - DNA, 99 bp, Homo sapiens
tttattagagctttctccacctttgatggaaatacctgggcacaagtaattgccttatacccaactttagtagaatgcatcacctgttcttcttcagaa

SEQ ID NO: 884065 - DNA, 98 bp, Homo sapiens
gccgctgctaaatatatccgtaggaatggagagggaccggatctcaggtcaaaatgcagatcttcgtgaaaacccttaccggcaagaccatcaccctt

SEQ ID NO: 884066 - DNA, 99 bp, Homo sapiens
tccaaagttaatgccaagaagcagccgccagttgggatcaaatgtgagcctatggatcaaggctatacagtttgatccagaaacccacctgcccaccat

SEQ ID NO: 884067 - DNA, 76 bp, Homo sapiens
tttcgatatgcaaaaaatcaaatctctcatgacccgacagagcaatgaagttgtctactacaatgcaaaggatgat

SEQ ID NO: 884068 - DNA, 75 bp, Homo sapiens
ccgccctgcgcttcgtgcaccggggcggtccgttgccaaagccagggcttcgtgggacacatatgcaacatgcct

SEQ ID NO: 884069 - DNA, 99 bp, Homo sapiens
tcgctgggctgctcttcctgaggttttcctaagccatcccctggcggaaccgcccccagatgacacccccaaccatggttgtgaagatgctagcgacac

SEQ ID NO: 884070 - DNA, 99 bp, Homo sapiens
gggaatggtattggagacaaatatgaatgagattgttacacaaattgatgcacaaaataagctggaaaaatctgaggctaccggctctctgaccagttc

SEQ ID NO: 884071 - DNA, 98 bp, Homo sapiens
gtccttccaacggggtgacctcatccgtattctgagcaaggtctcataacaacaaactgcagtctacagcttcttaaagttcagcgtgttaacctaac

SEQ ID NO: 884072 - DNA, 99 bp, Homo sapiens
ggagagctgaacattactcttccagaagaggtctaccctgaactgcagatcaccaatgtggtagaagccaaccaaccagtgaccatccagaactggtgc

SEQ ID NO: 884073 - DNA, 99 bp, Homo sapiens
cgaacatcacagtacattggtatctacaagacattatagagcacctgaagttattttaggcttacggagttcctatgctagtcagcatagtcagcttgg

SEQ ID NO: 884074 - DNA, 99 bp, Homo sapiens
agaatttttccaagttacagctacctagttcaggacctcaaggggctcggctatgagaaggggaagcctgtgggtctagtgggcgtcacagagctttca

SEQ ID NO: 884075 - DNA, 99 bp, Homo sapiens
ggcgatcggcggcgttgaggcgggatccgggcgagccgagtgaaggtgacagagctgaatgaacctctctccaatgaagatcgaaatctcctctctgtg

SEQ ID NO: 884076 - DNA, 74 bp, Homo sapiens
cgctgcgcaccgtgtcctcctccgtcatcgagcagctcttcttcgtccgtttgctcagatttcttttatccaag

SEQ ID NO: 884077 - DNA, 99 bp, Homo sapiens
ttacccaatggtggaatattgtatacctgtaatatatgctttaaacactaaaaatgatgagcatgaatctgcaattcaagccctcaaagatgctcatga

SEQ ID NO: 884078 - DNA, 98 bp, Homo sapiens
gcaactcggcagcctccacccaccggcccaccctacatttagcgcatcatgtgatccggtttcttaaacaattaggtctacatcctaactggcaattc

SEQ ID NO: 884079 - DNA, 76 bp, Homo sapiens
ctgattacaagaatcctatagaccagtgtaataccctgaatcccctcggtgctgattatcacaactgtttggtgac

SEQ ID NO: 884080 - DNA, 99 bp, Homo sapiens
gaaagctacgtgtggggtctacagatgctggcattgcctttgccccagtatattcaatgggagccccagatggcagaatagctgtgaaggcatgtgaag

SEQ ID NO: 884081 - DNA, 99 bp, Homo sapiens
aggaaagatggggttccaataggatacaaaggaagcaccttccacagacagatgtgctggtgctgagctgtgatctgataacagacgttgccttacatg

SEQ ID NO: 884082 - DNA, 76 bp, Homo sapiens
gctgcggaccctgccattccggaggagagccttgcaaaggaccatcgcatgaaacttatgcaacaacaacaggaag

SEQ ID NO: 884083 - DNA, 99 bp, Homo sapiens
ggtcatctcccggaagccagagtgatgctgaaccaagagagaggttacagcttagcttccaggatgatgagagtggacgcttctcttgtgagccagctg

SEQ ID NO: 884084 - DNA, 100 bp, Homo sapiens
ccgagtttatctggagtgtagagtcactggaaaccccactcctcgagtcagacgtatttcattagctagtccacgtcagctttttaaggcttctaatatg

SEQ ID NO: 884085 - DNA, 98 bp, Homo sapiens
aaagacagcaaatcttgtcattagcaactggaatcagcaaattaaggaatggtttgcagtgtatgtggaacttaatcagcaaattgcagcactcttga

SEQ ID NO: 884086 - DNA, 99 bp, Homo sapiens
acaagatgaagtctttctgccagaaacccaaggacttggacttcgcccagcagaagctgaccgataagaacctgggcttccagatgctgcagaagatgg

SEQ ID NO: 884087 - DNA, 99 bp, Homo sapiens
tggctccgagcgctgcccccgatgcagccaggcagtctatgctgcggagaaggtgattggtgctgggaagcatatcgacaaagtcttcaaacacaagga

SEQ ID NO: 884088 - DNA, 100 bp, Homo sapiens
ctgtgccaactgtgacctggagtgcagcgagcaggtagatgatgagctggagatcaaggcctactatgcaggccacgtgctgggggcagccatgttccag

SEQ ID NO: 884089 - DNA, 98 bp, Homo sapiens
ccgaactcgggttctgacaagatggccgggctgccccgcaggatcatcaagggtaataattcttgaagatgaacttgaaaagcttgtttgtactaaag

SEQ ID NO: 884090 - DNA, 98 bp, Homo sapiens
catgcacgtgatactcacacagtggcttctgctcaccaacagatgaagacagatgcaccaacgagatgacccctaaatccaaaaggaagagtatccat

SEQ ID NO: 884091 - DNA, 99 bp, Homo sapiens
agtgaccgaaggctccgctcacgcccgggagctattgtgacaatcttggttaccatccattaagtgctgctgattttggaaagatcatgaaaaacgtct

SEQ ID NO: 884092 - DNA, 98 bp, Homo sapiens
aagcctccagagaagtagaatctgtagaccttccacactgccacctgattaaaggaattgtgctttctcctgctcaagacagccacacgaacacggat

SEQ ID NO: 884093 - DNA, 75 bp, Homo sapiens
caaatcccggtggttggggtggtgacggaggacgatgaggcgcagctcttcttggatccctcgtggaaactacat

SEQ ID NO: 884094 - DNA, 99 bp, Homo sapiens
gaaggagaagatgtgccgccgctgccaacgtcgagcggcgacggctggaagggaatttgaaggagaagaagaatatctggagatccttggcatcaccag

SEQ ID NO: 884095 - DNA, 75 bp, Homo sapiens
ttccaagtggcagattatggaatagttgcagatttatttaagcttcagtatcagacacagcacagcagccatctg

SEQ ID NO: 884096 - DNA, 98 bp, Homo sapiens
agagatttttacttttgaaaaaaccttggaggaactctatttagatgctaatcagattgaagagcttccaaagagctccaggcccggattcgaactta

SEQ ID NO: 884097 - DNA, 98 bp, Homo sapiens
ttcgagtcatgcttgttcctagtccaagatatgttggtcttcaaaatgatgagcagtagatcatctaatgcaaaattgccctcagttccaacagttga

SEQ ID NO: 884098 - DNA, 98 bp, Homo sapiens
gaagacttgtaacctggagaagaggtttttagaacttcagccataaaaatgggcagaattttccttgatcatatcggtggtacccgtctgttttcttg

SEQ ID NO: 884099 - DNA, 100 bp, Homo sapiens
acaacagcgaggaagaagaggacgacgacgacgaggaagaggaggtttctgagaaaggagcagggtatcacttggatctcttttgggtggccatcctcat

SEQ ID NO: 884100 - DNA, 76 bp, Homo sapiens
cctctgggaggtgttcagcaaccccgagaggtatatggaggtcagtgggaacctgagggatttgtatgatgataag

SEQ ID NO: 884101 - DNA, 99 bp, Homo sapiens
ccaggcctctgtggcctaagtaacttgggaaatacgtgtttcatgaactcagctattcagattataaggcacttggtatcttaaagcggcagttcccta

SEQ ID NO: 884102 - DNA, 98 bp, Homo sapiens
gcacatcctgctgtccagtcagacctcggataacaatgccctgacacctgagcaacagggagctgccaccaccgtgtactgtgctgctgtcccagaac

SEQ ID NO: 884103 - DNA, 99 bp, Homo sapiens
ttggatgcctgtccaccactgtactgtttccactgtatccaaaaggaggggagaagttgcagtttgattatggtgtctatcttctgaacaaaaatatag

SEQ ID NO: 884104 - DNA, 76 bp, Homo sapiens
gacccccaagctcccgagaatcactccagctctcctggaagcagaaaattttacaacttcttccagaaagaattca

SEQ ID NO: 884105 - DNA, 98 bp, Homo sapiens
ggaatggcggcttccacctctgaagcgggcgacgctatgggtcccacaggtgtggaccactacaacgaggtgaagagcgtcaccatctgcgattacct

SEQ ID NO: 884106 - DNA, 98 bp, Homo sapiens
tgacagcacaggtcacagtaaggccaaaaatgtgcatactcacagagttagagagagggatggtgacctaaggattgtcttcggtctattatgagaag

SEQ ID NO: 884107 - DNA, 76 bp, Homo sapiens
cgcgcgggccctgcatgtggagctgccgtctcagcaggagaatgatccatctgtgagactgaaaattgcatcattg

SEQ ID NO: 884108 - DNA, 75 bp, Homo sapiens
cggccgtctccttaacaccgaacaccaagatgcaagtggaccaggaggaaccacatgttgaagagcaacagcagc

SEQ ID NO: 884109 - DNA, 99 bp, Homo sapiens
acgctgggactcgtacgagaacctcagtgcagatggagaagaaatacactttcgggaaatggcctctaaatcctggctgaattttttaaccttcctctg

SEQ ID NO: 884110 - DNA, 99 bp, Homo sapiens
gctctttgctacagatgaatgctttgccattgatgaggacatgactgcccgaattagcatggctgatgtcaagttctctttccaatgtcctggtcgcat

SEQ ID NO: 884111 - DNA, 98 bp, Homo sapiens
gacactatagtcgagccaaacagacgctccctgtgatttatgtcaaggtatattcaagagcaaatgaccaagagccatgtgggtggtggttggctaaa

SEQ ID NO: 884112 - DNA, 76 bp, Homo sapiens
gcgcgaatatcgtcatcgttagaagctcctccatttacaacctacaaagataaaagaaagtggaagccaaagtttt

SEQ ID NO: 884113 - DNA, 99 bp, Homo sapiens
aggcgggagacgagaagcctgaaaagtcgcagcgagctggagccgccggaggtttttgaagaaccctccatcagcctttttgctctggagcattgtgag

SEQ ID NO: 884114 - DNA, 99 bp, Homo sapiens
ccccctgccacctcagatatttaatggcgaccgatactgtggagccagagaagatgtgatccacatgctgaagacagagaaaaccaagcctgaggttct

SEQ ID NO: 884115 - DNA, 98 bp, Homo sapiens
gtacagtgtgcatcctacaacaacaagccattcatgggccggttttatgagtgggaaccatttgcagaaggaaatgtggctttagataatctacagat

SEQ ID NO: 884116 - DNA, 99 bp, Homo sapiens
cggcgggaccatgttcaccagcaccggctccagtgggctctgaatgtgttccagaagatctagaactgaagaagaagatttttgctcagttagattcca

SEQ ID NO: 884117 - DNA, 98 bp, Homo sapiens
aagaaggtgccggtggtgcgagtcttcggagcgaccccggcagatacttggtgcttgaaaaactgaagaaggaagacgctgaccgaattcatatattc

SEQ ID NO: 884118 - DNA, 98 bp, Homo sapiens
ccccctacccgcttctcgtagtcctgggagcacagcagaagttgtgctggaattgatgttcgtctgtgtgatgttggtgaggccatccaagaagttat

SEQ ID NO: 884119 - DNA, 99 bp, Homo sapiens
aagcatttacaataagaagagaagatggacagtttcagtgcattacaggcaccaccttccatggtcaataatgaacaacgccagcatgcagagcacata

SEQ ID NO: 884120 - DNA, 100 bp, Homo sapiens
agtgtggagggtgcccagcgcgccgctgctatcgcgcgccagaaggccgagattgccgcctccagggaaaagaagatctcccggagcagtgccctgaaag

SEQ ID NO: 884121 - DNA, 99 bp, Homo sapiens
caggtggactgaaggccgctatgatcgaattggtggaaaggttgaagttcaagagctcagaccctaaagataaaagaatcagagtgtctcaacccttga

SEQ ID NO: 884122 - DNA, 99 bp, Homo sapiens
ggacagtcatcaccatgggccgggatcacattctgatttgtcacatttgaagacgagcactgaggatgaggaaccaactgaagaatatgaaaatgttgg

SEQ ID NO: 884123 - DNA, 99 bp, Homo sapiens
aatcgggctgaagcgactgagtccgcgatggagggctctgtgtaccagaagaccaatgccgtgtctgagattaaaagggttggtaaagacagcttctgg

SEQ ID NO: 884124 - DNA, 99 bp, Homo sapiens
ggggcggcagcgctggacacccagcctccaggcctcatgcattgtgcgtcagcagcaatgtttatggtgaaaaatggcaacgggaccgcgtgcataatg

SEQ ID NO: 884125 - DNA, 73 bp, Homo sapiens
cctgaccccgtacctgctggggccggacaagaacctgaccgagagggaggtggttgtgggaagagaagtttgc

SEQ ID NO: 884126 - DNA, 98 bp, Homo sapiens
ttgtttcttggactgcagaaattggaagaataacatttggtcagccaggcttggacattcagagcagaagtatggaatacgtacagcggcaaatatcc

SEQ ID NO: 884127 - DNA, 99 bp, Homo sapiens
ctaaatctatagaaacacctaatgtcagggcagaccccttcaaagaactaagccacagcaattgtctgctattttaaaagcactgtgatgcttaaatat

SEQ ID NO: 884128 - DNA, 99 bp, Homo sapiens
acaaatgtacccccagtacacttactactatcctcattatctccaaaccaagagccaggctgcggcccactacaaaggcacgaaacatgccaagaagct

SEQ ID NO: 884129 - DNA, 50 bp, Homo sapiens
aaaacatcaaatcatttcttcggtgcaaggatggcttgaaaggatttaca

SEQ ID NO: 884130 - DNA, 98 bp, Homo sapiens
gaacctgaacaagtcccagctgaagctgggcatctggggcgtgtgccggtccaacaaaagcccttgggtctgtttgacttgttcaagtgtccactgtg

SEQ ID NO: 884131 - DNA, 99 bp, Homo sapiens
tcttggctcctgctctccataagattcatgagatatttgattgtcaagaatgtatgaagaaatttatttcagctaatcagctaaaacgtcatatgatca

SEQ ID NO: 884132 - DNA, 99 bp, Homo sapiens
atctctgagcccaagacctagggaaaggccatacaaatgtcagacctgcgagcgaaccttcaccttgaagcacagcctggttcgccaccagcggatcca

SEQ ID NO: 884133 - DNA, 100 bp, Homo sapiens
gtcgacgtggtgcagggcagagaagcgctcgtccacatcatctatttggccacagaccactcaagatggactcgattggttgatatcaacctagtacggt

SEQ ID NO: 884134 - DNA, 99 bp, Homo sapiens
atttgcataaagccaacattcgcaccgtcatggtcacagcaaaaatttctctgaagatgattttgcttctgcattgagaaaaaaacaatccgcatcttg

SEQ ID NO: 884135 - DNA, 99 bp, Homo sapiens
cttagagcgtctggccaagaatcagaggaagtgggtcaccctgctgattgccttcatctgtgtgcggagctccctgtggaccaactacagcgcctacag

SEQ ID NO: 884136 - DNA, 76 bp, Homo sapiens
ggaggaggatgaacactatgattaccaccaggagattgcaaggctgtcattatttgtatcaaaaacaaagaatttg

SEQ ID NO: 884137 - DNA, 99 bp, Homo sapiens
ctcaaccacaataacaggcggagggtcggcgtaggtgcttaatttacccatttctgatgcgaggaggaaagcctatgccactgttggcgtgtacaatgg

SEQ ID NO: 884138 - DNA, 76 bp, Homo sapiens
aacagagggattctttgactcagaaactacagatctttgtagaatttgatggctgtaactggaagcaacactcctg

SEQ ID NO: 884139 - DNA, 99 bp, Homo sapiens
gcaaattaaactttgatttttcatcttgtgaaagcagtccttgttcctatggcctaatgaacaacttccaggctgctttgtaccgcctcagtggagact

SEQ ID NO: 884140 - DNA, 75 bp, Homo sapiens
cctgaacctggaagttgtgctttttaagagtttcactcatgttgcccaggcttcagtgcaacgatgtgatttcag

SEQ ID NO: 884141 - DNA, 99 bp, Homo sapiens
ccggctgctgcagcccgcgcacagctgctcccttcgccttcgccctttccacctcgcggcagttcgaatggactgctgaattatgaagtatttcagacc

SEQ ID NO: 884142 - DNA, 99 bp, Homo sapiens
tttaggcggtatcaaatggaaagtttttccaaatattcatctgtacagcgatgaagaacgatacagatacagggaatatgcagaaagaggttatgagcg

SEQ ID NO: 884143 - DNA, 98 bp, Homo sapiens
ccggcttcagctcgcgcctcttcgccgtcatccgcttcgaaagcatcatccacgagttcgacccgtgcctggagaaacacatgctgtcacatactgaa

SEQ ID NO: 884144 - DNA, 99 bp, Homo sapiens
gctacttggagtagggacaaaatatcttggctcacgtatttaagagcctgaatattccaggccattgcaatcatggaagtagctcacggcaaagatcat

SEQ ID NO: 884145 - DNA, 98 bp, Homo sapiens
gtatcgccagcaagtacggattcatcaacataggacaggtggaatatgtgatcaagtgtgacatgtcagctctgcagaagattctgtatcgccatatg

SEQ ID NO: 884146 - DNA, 99 bp, Homo sapiens
tttctcttcatattttctcacatatacaacacgattcttctaatggatgggaacatggggaaacctcgacctgtctcccagttggttgcacagcaggtt

SEQ ID NO: 884147 - DNA, 100 bp, Homo sapiens
cctgacaatgtgaatgccctgaaagatcgagcagaggcctatttgatagaggaaatgtatgatgaagacttagaaatggctgttgcgtattggaaattag

SEQ ID NO: 884148 - DNA, 99 bp, Homo sapiens
ctatgcttacatggagaaaagtggaatggagaaaagtggtttggagtccactgtgtgtgtgactaatgtcagatcacataaccattaccccaaaagatc

SEQ ID NO: 884149 - DNA, 99 bp, Homo sapiens
tcaaccttgtgggatgtgaaaactctgttactgaagggtttgactgccgatgtggaaatttgttttgtggacttcaccgttactctgacaagcacaact

SEQ ID NO: 884150 - DNA, 98 bp, Homo sapiens
atggcacaaatccagcagggaggtccagatgaaaaagaaaagactaccgcactgaaagtgttatccaagataaattctgtgggattataaacatttca

SEQ ID NO: 884151 - DNA, 75 bp, Homo sapiens
tttgaggacacttgtggagagctcgaattccagaatgatgaaattgttgctgggcctaaaggagataacatttat

SEQ ID NO: 884152 - DNA, 98 bp, Homo sapiens
atttatgcaccgctagttgctgcatttagctaggtcttgactccactaacggggacttctcatacggctttgaacttggaccttggtgcataagcaaa

SEQ ID NO: 884153 - DNA, 100 bp, Homo sapiens
cacatcttccggccaacttccattgaacttcccagcactcgaaagggaccgaaatggagagcaaaggtagttagaaacaaacctgtggcaaggcaggctc

SEQ ID NO: 884154 - DNA, 98 bp, Homo sapiens
ggagctgtcgccggcggagggtgcatgtttgcgaggaagccgccgggcgccgcgcctttggactttgaataatgagatgagtacagatgaagacaatg

SEQ ID NO: 884155 - DNA, 76 bp, Homo sapiens
tggatttggacagtggctccttaccacagatcataggtcatctctgaatttgagcaatggtgaaacggaatctgtg

SEQ ID NO: 884156 - DNA, 99 bp, Homo sapiens
gccaattcatgaagcagcttatcacaactctgtagaatgtttgcaaatgttaattaatgcaggcagcagtgaggatgccagagttcatgggtttctaga

SEQ ID NO: 884157 - DNA, 99 bp, Homo sapiens
accggcgtgccccaccatgtcagacgcagccgtagacaccagctccgaaatcaccaccaagagccccggagctatgtggagtctgtggcacggacagcg

SEQ ID NO: 884158 - DNA, 98 bp, Homo sapiens
gactcttagcactttgaaagaaaaaggctacaaagctgctttcattggaatagtgaaagagtttctagccaaagccaaagaagactttttgaaaaaat

SEQ ID NO: 884159 - DNA, 98 bp, Homo sapiens
gtggctcggtgccttacaatgaatttggggaaagagttgtcaaacgaaacccatgtttctaatgaccagcagggcaccatgccggtggaaaggatgcg

SEQ ID NO: 884160 - DNA, 75 bp, Homo sapiens
gtctttcacgggacatgtctcagatatcaatgctgtcagttgtcgatacaccctgcaatacacctacccatatgc

SEQ ID NO: 884161 - DNA, 98 bp, Homo sapiens
agagaagccatgacaggagactggtgattggtgcaagcgacgtgggatgaggcatcagaacacaccatgatggctgtgacctaagaccctcaggaagc

SEQ ID NO: 884162 - DNA, 98 bp, Homo sapiens
tctatccaccatgtgggaggaggaaaatcatcttatcagacgaaggcaaaatgtatgacttaattcagtgcacaaatgagatgaatgtgaacatccca

SEQ ID NO: 884163 - DNA, 99 bp, Homo sapiens
ctgccttgctctttggaccacattgtcaattcacaccggtgcttgtactatttggcagagcggtaaacattttccctctttcctacctcctgaatttct

SEQ ID NO: 884164 - DNA, 99 bp, Homo sapiens
cttggccgactacctgacctctgcaaaattccttctctaccttggtcattctctctctacttggaaaccgaaccctcaccaaacagatctgcttgcaca

SEQ ID NO: 884165 - DNA, 98 bp, Homo sapiens
ctcgcttcacggaggcaatagctagccgctattgacctgaaaagtggttctggaaaagtgtaccaaggccctgcaaaaggtgctgctgatacaacaat

SEQ ID NO: 884166 - DNA, 99 bp, Homo sapiens
cccgggggtggtgacagcaggtctgagcttcaggatgagttagagaaaggtgaacgggacaatgcagaactgcaggagtttgccaacgccattcttcag

SEQ ID NO: 884167 - DNA, 98 bp, Homo sapiens
tcttgatcgccagcttggctctgggagacctgctgcacatcgtcattgacatccctatcaatgtctacaaggatcagttcagtgatatgagaatcagc

SEQ ID NO: 884168 - DNA, 98 bp, Homo sapiens
gggacgcgggcacacgcccgctcgcacaagccacggcggactctcccgaggcggaacctccacgccgagcgagaaaagcagcatctgttatagcaaaa

SEQ ID NO: 884169 - DNA, 99 bp, Homo sapiens
tccgggaggtcaacgaggtcatccagactctggcctggttgtcccaagtatttcctatgagctgcataaaaagctgttgtccgtggctgagaagcatgg

SEQ ID NO: 884170 - DNA, 99 bp, Homo sapiens
gtggatccaagatggcgacggcgatgatgtggtgctggaaaaagccatgcacaagtgcatcttgaagcccctcaaggggcacgtggaggccatgctgaa

SEQ ID NO: 884171 - DNA, 99 bp, Homo sapiens
gactccagcgtgctctctcggaataagacagagccaatgttttcagttgcaccaagcttagccaccaatgcatcagcagccgcctttaatccctatctg

SEQ ID NO: 884172 - DNA, 99 bp, Homo sapiens
tcagttcagtgttggcagcaatgagcttgtgttccaggtgaagggtgaagaaggtgaatacagtgaagaggaaaactccaaagtggagctgaaatcaga

SEQ ID NO: 884173 - DNA, 99 bp, Homo sapiens
tttctatgtttatgataagaatgttttacaaagagatctccgtataggtgatctttagacagtgactgagtatggatcatttgaacgaggcaactcagg

SEQ ID NO: 884174 - DNA, 98 bp, Homo sapiens
ggcatcctgtgctgtgggggctacgaggaaagaactcttaaaacgcctagatgacgtgtccaacgatgtgaggatggcagccgcctccaccttggtca

SEQ ID NO: 884175 - DNA, 98 bp, Homo sapiens
tcactcaggactccctgcagatgttcctgccccaggttcttgggtgtctctggggagtccctgggccagaccttcctccagactccagcccacctctt

SEQ ID NO: 884176 - DNA, 98 bp, Homo sapiens
acagtttgaccatccgaacatcattcacttggaaggcgtggtcactaaatcagcctgaaaaggtgatggcaaagcagatggagttcctttgcaaccaa

SEQ ID NO: 884177 - DNA, 99 bp, Homo sapiens
tcgtgaagaacctgaaggacacactaggtggctttctagaagatgaccatagaggaccttccagattttccattagaaggaaatcctttgtttggaaga

SEQ ID NO: 884178 - DNA, 76 bp, Homo sapiens
cgacactctgcaagattctctcctgaagtcccaggctgatcttcagacaagttctcagcgtttaaatctttcagcc

SEQ ID NO: 884179 - DNA, 98 bp, Homo sapiens
gaaatcatgtcaagcgaagccttgaaaaagctgccctgagacggtgtcccgccgaaagacatatgtagagtgtgtcggtcagaaggaacacctgagaa

SEQ ID NO: 884180 - DNA, 75 bp, Homo sapiens
ggagaatatccgatgttatctgccagatgcctataagattatgtctcaaagcttcagcgccagtcagcaaagtaa

SEQ ID NO: 884181 - DNA, 98 bp, Homo sapiens
gcgacctggagcggggatacacgtgctgcatttgatacagttcttgggataaatgttgcagtcaagaaactaagccgtccttttcagaaccaaactca

SEQ ID NO: 884182 - DNA, 98 bp, Homo sapiens
agaatacgaggaggaagaggtggccataccgttgaccgctcctccaactaaccagttaaaaatgtgtctgcaggcacacaggacgtgccttcaccccc

SEQ ID NO: 884183 - DNA, 76 bp, Homo sapiens
ctgtaacccaaaggaggaaacagctggctaagctcatcattgttactggggatcctttcagatgatcatgggctgg

SEQ ID NO: 884184 - DNA, 98 bp, Homo sapiens
actcctttgtctttgaaggcatgttgagtgagcaagtgaagaccaatattcaacaggcaggaactctaatgatccaggacaaagaagttaccctggag

SEQ ID NO: 884185 - DNA, 99 bp, Homo sapiens
ttggcagaaggtgatacaggtggttcagtcagtttgtcagggagccactggtgatgtggatggggcacagattgtctttaaagaagttcagaaactctt

SEQ ID NO: 884186 - DNA, 99 bp, Homo sapiens
gtggtgcagtttttgatgaaattgtagagaactgtttaccaaagatgcaggtcattaggaactattctggaacaccacccccagctctgcatgaaggac

SEQ ID NO: 884187 - DNA, 98 bp, Homo sapiens
tcaggatggggagatgacatcacttgggtacaaacttatgaagaaggtctcttttatgctcaaaaaagaaagctgtatgtgatggcttctgtgtttgt

SEQ ID NO: 884188 - DNA, 99 bp, Homo sapiens
gaagaagggaaggcgcgagtgaggaaaggaggtactgtagcttattgacatgtgtgtgcagaactgtggtccaagtttccagtctctgattgtgaagaa

SEQ ID NO: 884189 - DNA, 98 bp, Homo sapiens
aagattctgccgctgattgctatcacttctgcagaatccagtgggtgaatgaaaactttgccattgatttgatagcagagcagcccgtgagcgaggtg

SEQ ID NO: 884190 - DNA, 98 bp, Homo sapiens
aaacatggcgaccgagggaatgatccttactaaccacgaccatcaaatccgtgtcggagtccttacaggttgaagatgaaatccactgaggagggaag

SEQ ID NO: 884191 - DNA, 99 bp, Homo sapiens
gggactctacctggggatatacatgcatgcaccaaaacgaggacagaccagcatgttttggaaatttgatcttcactcatcatcccacatagacacact

SEQ ID NO: 884192 - DNA, 98 bp, Homo sapiens
cgatcctctccgtgggagccagcgagcctctctccctgatcttacgtgctcaaggaagctgccctctgtcgacagctccccatggaagctgagactct

SEQ ID NO: 884193 - DNA, 98 bp, Homo sapiens
gcggccgtcgatctcaagccgactctcaccatcatcaagacggaaaaagtcgatctggagcttttcccctccccggagtcaagggtccagagaaggag

SEQ ID NO: 884194 - DNA, 98 bp, Homo sapiens
cagccgtccggagccagccaacgagcggagccttcacgtaaatgggtccagtcatgcctcccagtaagaagccagaaagctcaggaattagtgtctcc

SEQ ID NO: 884195 - DNA, 98 bp, Homo sapiens
ccagagccaggtgaactggaggagcgatttgccatcgtgctggtatagtggaggattacaagccaccgttctacgatgtggttcccaatgacccaagt

SEQ ID NO: 884196 - DNA, 99 bp, Homo sapiens
gggtcatctccagatgctagggttatgggtaaccttttaaggtggagaccggtggcctgtttggggcagttcccctctagagggagaatttgtctctga

SEQ ID NO: 884197 - DNA, 98 bp, Homo sapiens
gacacggcatgatgttcgtccgcaacgattgcaagctcctggctaaatacaaaagcttgcaatgggacaaagtactgaggctggaggaggtgcaggct

SEQ ID NO: 884198 - DNA, 99 bp, Homo sapiens
ttaaaaacatcaaatgaacatcttcaaaagcatgtggaggatctgttgaccaaattaaaagaggatcgtgtgggtggacgagttgccacatttcgcaaa

SEQ ID NO: 884199 - DNA, 100 bp, Homo sapiens
caagactccttcagccaacatgatggtactgaaagtagaggaactgcctgatagcgcatatcaaggtggagtcttctttctcactgtacattttccgaca

SEQ ID NO: 884200 - DNA, 99 bp, Homo sapiens
acggccgccagctccccttcggaggtggacagttttccttatttgcgaggattagacggaaatggaacagggaccagttactctccacaagaaaattca

SEQ ID NO: 884201 - DNA, 76 bp, Homo sapiens
gtcataatagatttcgagacaacagtggccttctgatgaatactttaatattccagtaccagtacccggagagaac

SEQ ID NO: 884202 - DNA, 76 bp, Homo sapiens
cgcgcccgccagctgctccggagatacgatactctggatgaatattttgaatatgatgcagaggagttcttggtct

SEQ ID NO: 884203 - DNA, 98 bp, Homo sapiens
acaagaatatgctgccaaaattatcaacaccaaaaagctttctgctagggattctgaagactactttgaggtcaacattccaacagacctacgagcaa

SEQ ID NO: 884204 - DNA, 99 bp, Homo sapiens
agagaagaaataatggcaaataacttttccttggagagtcataacatatcactgactgctggccctgaaggaccctgttcatacagtgtcactgcagca

SEQ ID NO: 884205 - DNA, 100 bp, Homo sapiens
ccggagcccaagccgggtgctggcacatccgaggcgttctcccgactctggaccgacgtgatgggtatcctgaactccatccggcacaacctgtcactgc

SEQ ID NO: 884206 - DNA, 75 bp, Homo sapiens
ttctgagaaaatcttcagctcagacttgagggtcaactttaccagctgaagaccactctggctcacatcatagcc

SEQ ID NO: 884207 - DNA, 98 bp, Homo sapiens
ggggttccatctcccaacttgtccatattgcagagggaatggcatacatcgagcggaagaactacattcaccgggacctgcgagcagctaatgttctg

SEQ ID NO: 884208 - DNA, 76 bp, Homo sapiens
ggaagtactgagcctgttggaggaactggcccggaaacaggaggacgttccacgcaggcgcgggggacgacggcgg

SEQ ID NO: 884209 - DNA, 99 bp, Homo sapiens
gacagaagcgactttggtgagactctgctccagaaagcagtggggcctgagatcaccaagacagacctggtccctgccttccagaacctgatgaaagac

SEQ ID NO: 884210 - DNA, 98 bp, Homo sapiens
tcagattttgcattggatattcgcatgcctggggttacacctaaacaggacatatttgacagtgattggtacacttctcgaaatctaattgggggcgc

SEQ ID NO: 884211 - DNA, 98 bp, Homo sapiens
cataatggactcctcctatagtgccaataggtatgattttgtagaagttgaggaacccagtgatggaactatattagggcgctggtgtggttctggta

SEQ ID NO: 884212 - DNA, 99 bp, Homo sapiens
tttgatcctgattctacccaagtacatatgatttcagctgcaatggcaggtcgtcagcttgttctggaaactctttatgctttgacatcgagtacaaaa

SEQ ID NO: 884213 - DNA, 98 bp, Homo sapiens
gtcaacaaggaggtaccagaaaactgtgggtttggtaccatgtatgtagcagccgtggaaaagggtgttataacacaagactcaaggaagatggaggc

SEQ ID NO: 884214 - DNA, 99 bp, Homo sapiens
gcgaaggtctcagagctttacgatgtcacttgggaagatggagactggaaggtgaccattgtcactggggatcttgaaaatgccggcaccacggcaaca

SEQ ID NO: 884215 - DNA, 75 bp, Homo sapiens
ctttgaactactgccggagcttctgccaggatgctgatatgctaactggtgatgagcaagtatggaaggaagttc

SEQ ID NO: 884216 - DNA, 98 bp, Homo sapiens
gcggcggggcagctgccaggaacgagggtagcagatgtgaacgattggaagaacagctaaatgacctaacagagctccaccagaatgaaatcttgaac

SEQ ID NO: 884217 - DNA, 99 bp, Homo sapiens
caaaatcctcggattctctacttctgctatatgaagatcaatgatgcagactgatggttttgatgaagctgggcatttataactagattcattaaggaa

SEQ ID NO: 884218 - DNA, 98 bp, Homo sapiens
tttaaaatgctttcgaggaaacttgctcaacttcctgatagatgtacactgaaaactggacattataacattaaaactgtcaagtaatccacctctgg

SEQ ID NO: 884219 - DNA, 99 bp, Homo sapiens
gcagatctgtccttaggaaagatatttaccaaaagaagagattttatcgacatcgaaagtaaatttgccctaaggacccctgaagacacagctgaggac

SEQ ID NO: 884220 - DNA, 98 bp, Homo sapiens
ggacttcgtcgccaagctggccaacaacacgcaccaggttaatacaatctgttggaatgacactggagaatatattttatctggctcagatgacacca

SEQ ID NO: 884221 - DNA, 99 bp, Homo sapiens
tggatattcctgtttagtaaatatctttccctagctggaaaaggggaagatagtgatgtactcagtataaatgcagatgcttatgacagcgacatagaa

SEQ ID NO: 884222 - DNA, 99 bp, Homo sapiens
ctagatccaggttggaatcctcaggtcatgaagacatatcacatgtacaatgccgacagcatcagtgctcagagcaaactaaaggaggcggagaagcag

SEQ ID NO: 884223 - DNA, 98 bp, Homo sapiens
actgagggaacaaacacttctggatgcatccgaacgggaggatgaaattgctactatggagtgcatcaacaatggcaagtccatctttgaggcccgct

SEQ ID NO: 884224 - DNA, 98 bp, Homo sapiens
cgatatcttcgccatcgccagcatcgccaacccggactggatcaacaccggggagtctgcggagctgagaaaacagaagtccttagtgaagatctatt

SEQ ID NO: 884225 - DNA, 99 bp, Homo sapiens
ggaaaataaaaaacgtaacaaatcagatcgcactcctgaaattaggaaaattgccactgctttataagatgtcagctattgaaaacatggcagaaaagc

SEQ ID NO: 884226 - DNA, 98 bp, Homo sapiens
gtcattgtcacctcctgtagtggagcagatcatcacctccatgaagtgcatcatggggcaggatggcaccagccttgacaagttggatggcttgagga

SEQ ID NO: 884227 - DNA, 98 bp, Homo sapiens
tttgctctgaggaaccacacggggtgcactttgtggtttgccaccctgaccaccacacccaccagtaactctgggtggattttaactacaactcttgt

SEQ ID NO: 884228 - DNA, 98 bp, Homo sapiens
tttaaatgcagcatctgcgatgtgaggaaaggcacctccaccagatatttggagtctgggagtgatccttttcatgttggtgtgtgggcagccgccct

SEQ ID NO: 884229 - DNA, 76 bp, Homo sapiens
cagagacattgccagtcagtcagagatccagctatcaaaggcaaatggcaacagatccatcacaaagcgaagtcat

SEQ ID NO: 884230 - DNA, 98 bp, Homo sapiens
gagatccaaaggcagggcaaggaaactggccacaagaatgaagccaagagtgatgaaagaagctgtatctactccatcacgaatggcccacagggatc

SEQ ID NO: 884231 - DNA, 99 bp, Homo sapiens
ttggataagctgaaggaaagagctcaaagatttggtttgaatgtctcttcaatctccagaaaggtccccaggtgcatccaatttttcaactttaccaaa

SEQ ID NO: 884232 - DNA, 99 bp, Homo sapiens
tcgcctactgcctggccctccagctgtatgtgcggcgccgaaagaagctacccagtgtcctgattattcctgattctaagataaatgtgccagagttac

SEQ ID NO: 884233 - DNA, 98 bp, Homo sapiens
ggaaaccctgcattttgggaaactcgactttggagaaaccaccgtgctggaccgcttttacaatgcagaacccttaggagaaatcttgagagtggaca

SEQ ID NO: 884234 - DNA, 99 bp, Homo sapiens
ttgatttcaaatagatcagaggttggatttatgcaaacctgggccaaaggacagttagaagacgagctatcagcttcccagtttgcacaattcatcaag

SEQ ID NO: 884235 - DNA, 76 bp, Homo sapiens
gctatggccagagcagctattcttcttatggccagagccagaacagtgggaatggaagtggccccacatctcaaag

SEQ ID NO: 884236 - DNA, 76 bp, Homo sapiens
acagagggaactacaacagaggtggaatgcccaacagagggaactacaaccagtccctcagggccgggagaccgag

SEQ ID NO: 884237 - DNA, 98 bp, Homo sapiens
ttattcctgtccggagacagcctaaggttctaggtctcgttccagatcatattctccagctcataacagagaaagaaaccacccaagagtatatcaga

SEQ ID NO: 884238 - DNA, 98 bp, Homo sapiens
ctacagcaatgctccacagcacatgttttggagccctctcttaagtcagaactctgtcccaaaaatcttctgagtgtcatctcaggactttggttata

SEQ ID NO: 884239 - DNA, 99 bp, Homo sapiens
gccgaccgccatttcacatccagcagaggaggcgggggcagccgctgagacggtttttcacaagacaaatcttcctattttcaagctgaaagaatctac

SEQ ID NO: 884240 - DNA, 99 bp, Homo sapiens
tcatggtgtgcttccgcctcttcccggttccgggctcagggctcgttctggtctgcctagtcctggatctcaacagcaacggattcatttgtgactatg

SEQ ID NO: 884241 - DNA, 99 bp, Homo sapiens
ctaactgcaattcaagactgctgtactatcccaccttccatgatggaatgtactttatgaaaaatcgtgcccggaggcaaggtattaacttaaaacttc

SEQ ID NO: 884242 - DNA, 98 bp, Homo sapiens
tcagcccgtcttccttcccctcccttgcatgatggaaacaccatggctgcggcggcccagctctctctgacacagatcggtcgcttggttatcggaca

SEQ ID NO: 884243 - DNA, 100 bp, Homo sapiens
ttctttgtcatgtagccaagactggagaaacaatgcacaacccgatctcccagagaaggagaagtgcctggcgtggactataactttctgactgtgaagg

SEQ ID NO: 884244 - DNA, 99 bp, Homo sapiens
caattaacagcagaccgagtcaaaagcttcagtaaagaaactgcggcaatgaaagctgatctcctgagggccaggaacatgaagaggtacatcaaccaa

SEQ ID NO: 884245 - DNA, 99 bp, Homo sapiens
ggtctcggtggggcccgagaggccggcggggcctcccgggaggagaacggggaggtgaagccgctgccccgagcttgcctgggaccagtggcagggacc

SEQ ID NO: 884246 - DNA, 99 bp, Homo sapiens
ccgaacccgcgatggaataatgcccagcggcccgccaggtcccggagtggctgtaaggtgaagaagcatgaaactcagtctctcgccctggatgcatgt

SEQ ID NO: 884247 - DNA, 99 bp, Homo sapiens
tggagctccgccgccccgaaactttcaccgcgagcggcccacacatcttgctgacttcactcaagtgcaaaccattcagtattcaaacagtgaagacaa

SEQ ID NO: 884248 - DNA, 99 bp, Homo sapiens
taaaaaagcagaatggaatgggccttagcattgttgcagcaaagtactatactggcaattgctggagaagattttgcaattgttgcttctgatactcga

SEQ ID NO: 884249 - DNA, 99 bp, Homo sapiens
cagcatgtcagaccagaccgtccgggtgaaggagcagggaaaacctgaggtgcttggaggtccagacacaagaagaggattggaaccagttccgataca

SEQ ID NO: 884250 - DNA, 99 bp, Homo sapiens
tactattcggggaaagaattgaaccttcaccatataaggcctttccccctggtgctcttcatcctttaccaaagagacaagcacttgaaaaaagcaatg

SEQ ID NO: 884251 - DNA, 98 bp, Homo sapiens
tggaaggaacctgagctacgagccgcggcggcagcggggcggcggggaagcttttcggctttgtgagaaaccttaccatcaaacacgatggccagcaa

SEQ ID NO: 884252 - DNA, 98 bp, Homo sapiens
ggaaatccggcggcgccagccactcggagctaatccacaatctccgcagacatccaggcagaaattgatgcccacaatgacatatttaaaagcattga

SEQ ID NO: 884253 - DNA, 98 bp, Homo sapiens
gggctcaagggcgggccagaggtggtagcatgccaggcggcatattttctaccttcagcatcacttaaatggtaggtttcctcacagcatgacccagt

SEQ ID NO: 884254 - DNA, 76 bp, Homo sapiens
tgcgacctcaggaaggagatgagcagacaatatgaaacaccctttgaaggcaacttaattaatcaagagatcatgc

SEQ ID NO: 884255 - DNA, 75 bp, Homo sapiens
agctggacgagccccttgggaagaatgatggggcggtggcgggcaccagctctggaagagaaatggccccagttc

SEQ ID NO: 884256 - DNA, 98 bp, Homo sapiens
aaagcagaggctcagagcttggagacagacggaggagagacttcagcatgcaaaccttcatctgttcggcttgcaccgtcattttcattccatgctgc

SEQ ID NO: 884257 - DNA, 98 bp, Homo sapiens
agggcgatggacggccgaaccccgcgcccgcaggacgccccagccagcttaaagaaagtggttattgtacaggtcatgaaccagattccctggagttc

SEQ ID NO: 884258 - DNA, 98 bp, Homo sapiens
gagaacaagatatatatcttccaatagcaaacgtggctaggataatgaaaaatgccatacctcaaacgggaaagggtcgtaagagtgaggctgaaaag

SEQ ID NO: 884259 - DNA, 98 bp, Homo sapiens
ccgccccgccatgagccccccgctctgagggccccggcccctggatgcacagccccggcgctgagtggagactgctgcacggactctggaaccatgaa

SEQ ID NO: 884260 - DNA, 76 bp, Homo sapiens
ggcagatccttcagcaaaagctgtccttacaggtatcattgcccagtgcctaagatcttttatgttcagctcactg

SEQ ID NO: 884261 - DNA, 98 bp, Homo sapiens
ggattggaccgacgcagccatgctttctccatctctggtgaaagtagccaagtggtcatgatcgccatttcagcggcagtagcaattattctcctcac

SEQ ID NO: 884262 - DNA, 98 bp, Homo sapiens
tttattaacaaattggaccgaatgggctccaacccagccagggccctgcagcaaatgagatggagatcttataacaatttttgatagttctgaccttt

SEQ ID NO: 884263 - DNA, 100 bp, Homo sapiens
gctgtgaacgagtgtgatattactgaatattgtactggagactctggtcaggccaaagaacagacaggagcaacggcttctgtcatttatgttcctccgc

SEQ ID NO: 884264 - DNA, 99 bp, Homo sapiens
tcaattcctgatctcacaccaaagcaagttgacatgtggcaaacacgtcttagtacacatttggttttagctgaattttgggacatggccactgcttca

SEQ ID NO: 884265 - DNA, 99 bp, Homo sapiens
tgaaaagtcgcagcgagctggagccgccggagatgccagtatggacagaatagcttatgatgcttatccccacccaccacttccgaaacattgagcgga

SEQ ID NO: 884266 - DNA, 76 bp, Homo sapiens
agaatttcttcagaatgcagtttacattaaccttcgacagttcaactttgtggggaaacttttgggtccacgtggc

SEQ ID NO: 884267 - DNA, 99 bp, Homo sapiens
gaacccgaagaagaaaggattcgttacagccagagattggattcactccttctccagttgcacagccacacccttcagctggccttaatgttgactttg

SEQ ID NO: 884268 - DNA, 98 bp, Homo sapiens
gctacttctcggcgctgccgtctctggaggagtactggcaacaggattttcaaaatggctgcagctcctcaagcaccggggcggggatctctccgtaa

SEQ ID NO: 884269 - DNA, 76 bp, Homo sapiens
gtgcattgcctttggaaacgagctgttgacagtgtcttgaagaggatgacaataattggtgtaattttatccttcc

SEQ ID NO: 884270 - DNA, 98 bp, Homo sapiens
gacaaaacaccagatgatgaccctgagcaaggaaaatctgagggttttgaacgaagaatgtgatcagaactggtacaaggcagagcttaatggaaaag

SEQ ID NO: 884271 - DNA, 98 bp, Homo sapiens
tttgctatcttctccagacagtgaacaaaggcagtctgttgaggcatctggacaccacacacatcatcagtctggaaatggagttgttttttccttca

SEQ ID NO: 884272 - DNA, 99 bp, Homo sapiens
aaaaaggaagattggactatgctaagttttatgagcaatatgatgatgatgaaattggagctctggataatgcagaattggaaggttctattcaagtgg

SEQ ID NO: 884273 - DNA, 99 bp, Homo sapiens
aactggagcagaaattggaggctcagcatagctattgcagatcccaaccccctgctagactaataagtggagaggaacatttttcaagcaagaagtgcc

SEQ ID NO: 884274 - DNA, 99 bp, Homo sapiens
aggatgtcacgacggacaaatatgtctctgggatctttcagtagaactgcaacaaagccgaattgaagatcgtttagaaagactggatgatgctattca

SEQ ID NO: 884275 - DNA, 99 bp, Homo sapiens
aagcaactcatattagtgctttgttcagaagaggtggatgagaatggcaaaattagtcgccttcgtcgagagtgcccttctgatgaatgtggtgctggg

SEQ ID NO: 884276 - DNA, 99 bp, Homo sapiens
catgttaggacattatgtaaattgtgaggattcttatgtggctagtttgcagaacctaatccaccaatagatcaagttatacagaaaccaggagttgta

SEQ ID NO: 884277 - DNA, 98 bp, Homo sapiens
ggatggtgcccgctgtgcgtgtggacttctacaatgcagacgagctcaagattcagagcattcttcactccagaataatgagcaaccctctttggcca

SEQ ID NO: 884278 - DNA, 98 bp, Homo sapiens
tcggcggcagctgtgagggggttccgggaagatggtgctgatcaaggaattagttacactgttagaccttatgatagccaagataacgagtgatgagc

SEQ ID NO: 884279 - DNA, 99 bp, Homo sapiens
gcagctaggccaggaccctttctttggtgaggaagaaaatgcttcccgttcttctggatgggcatcctatcttcatagttggtctggacttcgataggt

SEQ ID NO: 884280 - DNA, 98 bp, Homo sapiens
gacaggaatgcaaaaagagttgtcctgtagttcgaatgggactttgattcctggtttgatacaaacaactgccttggggatcaaaaactagttgagag

SEQ ID NO: 884281 - DNA, 99 bp, Homo sapiens
gcttcttcagatggtacccttaagattctggacctcttagaaggaaggctcatctatacacttcaaggacatacggttacttgaatttccactagagga

SEQ ID NO: 884282 - DNA, 99 bp, Homo sapiens
taccgaatctatgagatgaacaagagactgcagtctcgcacagagatttgggatgatgaaattgttgcagacttttacgtagctgttccagaaataatg

SEQ ID NO: 884283 - DNA, 98 bp, Homo sapiens
gctgctgtgccccaggctgcagagcccatagccaccttctatgggttaaggcaacagctcttgaagtcctattggctggataattttgcaaaagattc

SEQ ID NO: 884284 - DNA, 99 bp, Homo sapiens
gcactttaccctttttaatattggccaatcatcaagacaagccagcagctcgctcagtacaagaggctgctttgtaccgcctcagtggagactggaatc

SEQ ID NO: 884285 - DNA, 76 bp, Homo sapiens
cccgtactgcacatcgtggtggtcggatttcaccacaagaagggctgccagggatcgtgggactttaccagatcgg

SEQ ID NO: 884286 - DNA, 99 bp, Homo sapiens
cgaggtagaagaagatgaacccacagatttggttgaaaggattgttgacaaaaggaaaaataaaaaagggaagacagagtatttggttcggtggaaagg

SEQ ID NO: 884287 - DNA, 99 bp, Homo sapiens
ccagctgcgcgtcggcgagctcacccagcaggcgctgcagcggtacctgaagacccgggagaagatcaggaagtgtgctgcaccactggaatgaaatct

SEQ ID NO: 884288 - DNA, 99 bp, Homo sapiens
ttacataaacctttagaacttacattagagtgttcaagtcttctgagactccagagtcacctaagatgcatggtcatggaggctatgattctgatttta

SEQ ID NO: 884289 - DNA, 98 bp, Homo sapiens
aggatgaagaggaagaggctaccaaggaagatgctgaggccccaggcatcagagatcatgagagctgcccaagctggaacactatagacccagaggag

SEQ ID NO: 884290 - DNA, 98 bp, Homo sapiens
tccagacactatttcattagcctcagaacgatatgataaagacgatgaagccccctctgatggatttcatgatgtgctgggcaatgaaagaccttctg

SEQ ID NO: 884291 - DNA, 99 bp, Homo sapiens
ctctttgaagccaacaaccttgtcatctggccttcagttgctccgcagagtcttccactgtgggaaggtctgctgagaacagacccagtccctgaggaa

SEQ ID NO: 884292 - DNA, 99 bp, Homo sapiens
gggagggactgagtcgccagcaggtgttgacccgcattggagtcatgtctctcgtcaaaaagaagctggtgcccctgggtgaactgaccaagcacagca

SEQ ID NO: 884293 - DNA, 75 bp, Homo sapiens
ccacccagcagcagggcatcaagagcctggagaaagttcttgtggaattcagtcacaaggagttgtttgatttct

SEQ ID NO: 884294 - DNA, 98 bp, Homo sapiens
tgaggccaagctccagtgtcccacttgcatcaagctgggcatccagggctcgtacttctgctcgcagtttggggatatggattcctgtcagtgacgat

SEQ ID NO: 884295 - DNA, 99 bp, Homo sapiens
acctctcatggctaagagaactaaacagatgctgagctttttataccaccaaagatcaacagaagaacccagtggaagctgagcctgctagactgagtg

SEQ ID NO: 884296 - DNA, 98 bp, Homo sapiens
ccgcccgaagaggagagagcgcgggcctctaggaagggtgatcagcccatgacctaaacctccagacaaaataaaacggaaaatttgctagaatcaag

SEQ ID NO: 884297 - DNA, 73 bp, Homo sapiens
caggcatctgcatctggaatgtttcctggacaaagaagctatgctaagaaggaatctgatcttaatggcgccc

SEQ ID NO: 884298 - DNA, 99 bp, Homo sapiens
cgcggcgggcgcgagcgaggcgccctagacatcttctccctcccttgcctcaggtttttgtcatccattggagggacactgtatgaggttggaaagcct

SEQ ID NO: 884299 - DNA, 98 bp, Homo sapiens
gagtacattcccttgagacactactaccaccgccacacgcgcagcatcttctgggagctccaggttggacgtgataagtatgagcctgcagctgtttc

SEQ ID NO: 884300 - DNA, 98 bp, Homo sapiens
gaacgaaccccacaagaattccatattggaggaaagaccacagcaagattctttcattcgtctcctcctagcctgggggaccaggctcgaactgaccc

SEQ ID NO: 884301 - DNA, 99 bp, Homo sapiens
caaaatgagctacataaattcctaatctgggatacagctggacaagaacgagcgcgggtttaagtggacgccaggtgcaccggacacaggctgtgttta

SEQ ID NO: 884302 - DNA, 76 bp, Homo sapiens
cccacatcaatgcactgccaatgttatttcaagtaccattggaagaggaaggacaacgtggtggacctatccttgc

SEQ ID NO: 884303 - DNA, 99 bp, Homo sapiens
tctccagaatttctcctcataaaaaagatgatggacctagccaaagtgagtctgctactgagactgccatgacactaccaagtgaatccagagtcaata

SEQ ID NO: 884304 - DNA, 98 bp, Homo sapiens
aaccccgttgacaaggcactgctttttcatgacgagacctgtcggccatggagcctaatgatagtaccagtaccgctgtggaggagcctgacagcttg

SEQ ID NO: 884305 - DNA, 76 bp, Homo sapiens
agtcctaccactgacttctcttatggaatacctgctgcagagatttcatgacagtgatgtgtgttctgaaattgtg

SEQ ID NO: 884306 - DNA, 99 bp, Homo sapiens
gatgacatcctggaggatcaggtggagcctgatggttgttgccatggagctgaggatgaggaggcacctttagagccaggtgtttctgtaggagtgtca

SEQ ID NO: 884307 - DNA, 99 bp, Homo sapiens
ttggtgccaacagagttactcttgttggaaaaccttggacagacaattgtccccgatttgggatcactggaaagtcagcatgattttcgaaccccggag

SEQ ID NO: 884308 - DNA, 99 bp, Homo sapiens
gatggctggaggcctctgttgtaggcaagatcaacaaaggctccatgacaattcaaaaggtgaagggattgctgtcacgtcttctcaaagttcctgtgt

SEQ ID NO: 884309 - DNA, 99 bp, Homo sapiens
ttccaaaatcctcggattctctacttctgctaggttggagcaatcactgaagaaactgaagcctgtgattggtggagtttgggtgctgtcctctttgaa

SEQ ID NO: 884310 - DNA, 99 bp, Homo sapiens
gtttttgaagaatctcagcataaataacgacttgaaccttagatattgtatgggaaatcaaggtgaccctgagagtgtggctggggagtatgggcggca

SEQ ID NO: 884311 - DNA, 98 bp, Homo sapiens
ttaaggaaccagtgaaatttgttccacaggatgtgccaccagaacccaagaagattccgataagaaacacgaaatacactttcgggaaatggcctcta

SEQ ID NO: 884312 - DNA, 98 bp, Homo sapiens
ctctttaataaccatgcttaatgcaaaagaccttctacaggacctgaagcctaagatctggcaaacttggtgaacagtgtgaagcagttgttcgcttt

SEQ ID NO: 884313 - DNA, 99 bp, Homo sapiens
ttgcggcgaaaggaacggctgaaggccctacgggagaaaaccgggcgcaagggtttcttccggagaacaatcagattgaagcttatctatgacagatgt

SEQ ID NO: 884314 - DNA, 99 bp, Homo sapiens
gcaggaggcgatgaggtggcagaggtctcctttgagaaggagacccaggagaacaaactggtgtgcatgggcatccgcttcgatcctgaaattccgcaa

SEQ ID NO: 884315 - DNA, 76 bp, Homo sapiens
accggggggatgtggcgattctacacagaagattcacctgggctcaaagttttacttctacaatttcggatggaag

SEQ ID NO: 884316 - DNA, 98 bp, Homo sapiens
tgagcgcctcgcctggatgtgagtttcagccagggtaacaagaaggggcccttaggccgttgggactttgatacccaggaagaatacagcgagtatat

SEQ ID NO: 884317 - DNA, 98 bp, Homo sapiens
aggaaaacgtggatgattactacgacaccggcgaggaacttggcaggcaagacatctgtatagattctgcttcatccgtgagagagaataagcaacct

SEQ ID NO: 884318 - DNA, 98 bp, Homo sapiens
tggcctgcagcgctcccacccccggcggcggcacgatgccctttgacttcaggagatggtatacctcaagtttactatttcggcccttgtggtaaata

SEQ ID NO: 884319 - DNA, 100 bp, Homo sapiens
atgggaaggaaaagtgtggagtccgtgtggatttctcttattttatctgtggcttgaatgtacatttctgagagaggatgccgacatcagtggctcagac

SEQ ID NO: 884320 - DNA, 75 bp, Homo sapiens
cgaagatgggggatttctacgacccggagcacccgacccctgagatgtgaggtctggaacagctgcagccatttt

SEQ ID NO: 884321 - DNA, 75 bp, Homo sapiens
ggaaatggctgcaggttcagaactgggctggcttagatgaagatgaagatgcacatgtctgggaggataattggg

SEQ ID NO: 884322 - DNA, 98 bp, Homo sapiens
tagaggcagtggcgcttgagttggtcgggggcagcggcagataaatactgcaacaactgtagctgacttaaagtcaataataaatgaatgctataact

SEQ ID NO: 884323 - DNA, 98 bp, Homo sapiens
tttcctggcctgttgcagccatggtgcattgcagttgcgtgttgttcagaaagtttctgatgaagaattgaaaagaagagtagctgaggagctggcat

SEQ ID NO: 884324 - DNA, 98 bp, Homo sapiens
gaagcaccaccagcatgccctggatgttgtcaacatggccatcaccgagcaccctgagaacttcaacgcggagacccacatcaagggcttcacactga

SEQ ID NO: 884325 - DNA, 98 bp, Homo sapiens
tttgctcaaggatcccagttttctctggatgacgtggaaatgggtcctgatgaatatgaagagatggaagaagaggaggaggaggaagaggaggaaga

SEQ ID NO: 884326 - DNA, 75 bp, Homo sapiens
agtccaaggatgaatcccagtccctgttacggccggagtatgagcaatatcttatcagctcacgatacatttatg

SEQ ID NO: 884327 - DNA, 99 bp, Homo sapiens
gggagtatcgtcctgaatatgaacgtctgaaaaaatcactggaggccagatgctccagtgcctgatggcgaaagtgagaaaactgtagaagaaagttca

SEQ ID NO: 884328 - DNA, 99 bp, Homo sapiens
gctgcaggcgggggtgctgcagaggacacgaggcggcgggctggagacatggaccgcggcgagcaagggcgcaaccatgtcgccatttcttcggattgg

SEQ ID NO: 884329 - DNA, 76 bp, Homo sapiens
gtcttgctcggccgatgaagtgcagaggtttttttctgaatgacatcactcctttacatgttgcatcaaaaagagg

SEQ ID NO: 884330 - DNA, 98 bp, Homo sapiens
acgaaataaagctcctgggcaaggggacgtctgcagctgagtaacaacatccattttatacaccgcgataggaataggttggatcacaaacctatcaa

SEQ ID NO: 884331 - DNA, 99 bp, Homo sapiens
gaggccggcagctggcgctggggatccctgctcttcgctctcttcctggctgcgtccctagcctgtaactgcaacctgcatgcccggcgctgccgcttc

SEQ ID NO: 884332 - DNA, 98 bp, Homo sapiens
tcttcttccttactgtaatgggactatttctactccacataatctgatgttcctcctgctgatcaagagaagctttttatccagaagttacgtcagtg

SEQ ID NO: 884333 - DNA, 98 bp, Homo sapiens
gggtcccgccctggggccggcgatgtgccaccgaggctgaggatgatggtagattgccagacaaatttacatgtattggagaccagaccagaagccct

SEQ ID NO: 884334 - DNA, 98 bp, Homo sapiens
gacctgcatgtgtgtgcgcgcgaaggagcggaagaatggcagtgctcaaactcaccgaccaggatgttggcaaaggatgaactgatgaccatacttga

SEQ ID NO: 884335 - DNA, 99 bp, Homo sapiens
gaaacatgaaaacatcgtggccctgtacgacttccaggagcatcagatccatgctgctgctgactcggagccccacagcttggcacaggctctctcagc

SEQ ID NO: 884336 - DNA, 99 bp, Homo sapiens
tgtgtatcttctcagattggcttcaactgcagttggtgtagtaaacttcaaaggtttgcagctaaaactgtgcacagtgggtcattgatgctagtcaca

SEQ ID NO: 884337 - DNA, 98 bp, Homo sapiens
gggagtggagccgacttggaaactcaaggccaatctcaggttgagacatggttatgaagacagtatggagtttccagaccatagtagacatttgctac

SEQ ID NO: 884338 - DNA, 98 bp, Homo sapiens
cggaggcggaggcagaggtggaggcgctttgaaaggtggatccataaagaacccagccaacccgcagagggaggggaggggctgagctgtgaggagag

SEQ ID NO: 884339 - DNA, 99 bp, Homo sapiens
gggaggcggcggccgcggcggctgctgctgctgcagtgggacaggtggcggcgaccggcggcgtccgaggaggtgaccccagggtttgaagaaaaggag

SEQ ID NO: 884340 - DNA, 76 bp, Homo sapiens
aaatataaacctttcaagagtcaagtaaagatactcagaactaaccactgttcaacaacagctaattagggagacg

SEQ ID NO: 884341 - DNA, 99 bp, Homo sapiens
tgaagaagaacagctcgagagagcattacaagccagcctctgggaccgaggaagcagaacatcagagagccatgcagagacgtgctatccgtgatgcca

SEQ ID NO: 884342 - DNA, 98 bp, Homo sapiens
aaaatgctctcccatctgctccaggctttagattatggggcaccccctcatggaggaattgccttaggctcacgaggcccagggaatcctctggacca

SEQ ID NO: 884343 - DNA, 98 bp, Homo sapiens
agagggaacatgctgagaaactgatgaagctgcagaaccaacgaggtggccgaatcttccttcaggatatcaagaaccgaatgcatgaaagcatgaaa

SEQ ID NO: 884344 - DNA, 99 bp, Homo sapiens
tgagcacgcctcggatgcgcaaaggcccctcgagagggctgaacccccctcatcgtgtcaagtcaatctccatgacaactttcactgagcctgaagtag

SEQ ID NO: 884345 - DNA, 98 bp, Homo sapiens
gtgtttgagctccagaaggagggcagagaggccagcttcctgccagtgctggagggagagcaggtccataacttagtggcaattgaactggcttatat

SEQ ID NO: 884346 - DNA, 98 bp, Homo sapiens
acttccccaccgaggccatgggcccaggagttctgctgctcctgctggtggccacagcttggcatggacctccggctagcctgtttcagccacctcgt

SEQ ID NO: 884347 - DNA, 76 bp, Homo sapiens
cgcgcagcgtgtcaggcggagagacccgccgccaggtaagtaaggaggtctctgtaccatggctcgtacaaagcag

SEQ ID NO: 884348 - DNA, 75 bp, Homo sapiens
gaaccctgctcttggcatcgactgtttgcacaaggggacaaatggtccaggttcacactagaaggccaaaacttc

SEQ ID NO: 884349 - DNA, 99 bp, Homo sapiens
tcagggctcccactgattctacattatgggaactctaatgatccaggacaaagaagttaccctggagtatgtatcaagcctggatttttggtactgcaa

SEQ ID NO: 884350 - DNA, 100 bp, Homo sapiens
gaggagtacttcgccacttactttaatgagaagatctccattcctgaggaggagcatctttacagttcaagtggatgaaaacagaagatacatgcaaaac

SEQ ID NO: 884351 - DNA, 98 bp, Homo sapiens
aacaccctccgccgcccagtggccccgaggagcctggggagaagcgccccaagtttctgagatgagtgaactgagtgtggcacagaaaccagaaaaac

SEQ ID NO: 884352 - DNA, 99 bp, Homo sapiens
aaaagctggatacaatgtaaagcagagggcacgagacatccacttgacagtggagcagaggggttacccagatttcaacctcatcgtgaacccttatga

SEQ ID NO: 884353 - DNA, 76 bp, Homo sapiens
cagatatgcaagtctgtgaattggaagctgtgattaagcactcattggtgcataaagtattcttggacttttttac

SEQ ID NO: 884354 - DNA, 98 bp, Homo sapiens
acaaactctggagtaattggagccaagaaatgagtatagcaatggctgccatccggaagaaactggtgattgttggtgatggagcctgtggaaagaca

SEQ ID NO: 884355 - DNA, 99 bp, Homo sapiens
agaaaaccgggaactcagagtcaaagaagaaaccgtgctcagaaactagccagattgaaggcattgacaagactccatcaactgaaacttttaggtcat

SEQ ID NO: 884356 - DNA, 100 bp, Homo sapiens
caggatgcctgagccggggaagaagccaggccttcactatcatggaccagaacagggatggcttcattgacaagaacgatctgagagacacctttgctgc

SEQ ID NO: 884357 - DNA, 100 bp, Homo sapiens
caacattgccatgcccctgcatatgatatttagatccgctagacagcaacaagcagaattggcccaacaggaatggcttcaaatgcagcaagctgcccaa

SEQ ID NO: 884358 - DNA, 99 bp, Homo sapiens
ttgcctttctggacacagaagtatttgtgacaggaagaacatacttcgtttcttagatgcagaacgagatgtgtcagtggtcaagagcagttttaagcc

SEQ ID NO: 884359 - DNA, 99 bp, Homo sapiens
aagagcatgttccagaggaccacgtacaagtatgagatggacatgggcttaaaggcattcaccaactcaaagattcgtaaacccaaaatgtgtccacag

SEQ ID NO: 884360 - DNA, 99 bp, Homo sapiens
tttttgctgcgttgaaagccttgaagtacttgtttagattcatcatccaatcccgagtgctctacttgaggtccccttcccctgagcccatctacaata

SEQ ID NO: 884361 - DNA, 98 bp, Homo sapiens
aactatgtggaggagatgtactgtgcttggctggaaaaccccaaaagtgtacataaggttgaaatcacaaagattagacacctttttagataggtgtt

SEQ ID NO: 884362 - DNA, 99 bp, Homo sapiens
ggattgctactgcacggtgaacctggaccaggaggaggttttcaggaccaaaattgtggaaaagtcactctggctttcatgagaaggacaagaagccat

SEQ ID NO: 884363 - DNA, 99 bp, Homo sapiens
gcagatgctggggagtactcctgtgtgtgtggggaggagaggacctctgccactctcaccgtgaaggggtcacggagactcaccagttggcagaattaa

SEQ ID NO: 884364 - DNA, 100 bp, Homo sapiens
agaaggactgcctcactgagcaaccaagatgttatccaagataaattctgtgggattataaacatttcagtagaaggcctgcatgatgtcatgacggaag

SEQ ID NO: 884365 - DNA, 99 bp, Homo sapiens
tcgcctccggaggcggcgaggagcggcggctgccaaggggccaagggatgagctggggccctccttcccaatggcatctccccctggtctggaactgaa

SEQ ID NO: 884366 - DNA, 99 bp, Homo sapiens
ataaacaagaattggaagacatgaggaaagctggtcacgaagccctcagcattattgtggatgaatataagctcttgaagtcctattggctggataatt

SEQ ID NO: 884367 - DNA, 99 bp, Homo sapiens
cacagttatgcactttaccctttttaatattggccaatcatcaagacaagccagcagctcgctcagtacaagaggttttgattcccaccatggccatca

SEQ ID NO: 884368 - DNA, 98 bp, Homo sapiens
tccctttggccgcagtagtatagagctgaccaagatgctatgtgagatcttgaaagtgggcgagttgccgccagccagcctttgacacctttgatggg

SEQ ID NO: 884369 - DNA, 99 bp, Homo sapiens
ggcagtttccgtgggtctgtgaagaggtcggcggcccctgcgggcgccagtcagaatcctgctgcatcacagaagctggaagttctgatgttccactga

SEQ ID NO: 884370 - DNA, 99 bp, Homo sapiens
ttcagaatgctgcggttttccaaggtggggaccaaggcatactgaacacattttttagcagctgggcaacaacagatatcagaaaacacctgccgttta

SEQ ID NO: 884371 - DNA, 98 bp, Homo sapiens
tgattcccggaccctggaagagaagagggtggctaatgattaaggtccagcctgatgagtgaagaggctaagcgaggagcacccaacccttggctctt

SEQ ID NO: 884372 - DNA, 99 bp, Homo sapiens
cagaatggatgtcctctttgtagccatctttgctgtgccacttatcctgggctctctaggaaacaccagaattatcagtgaagaatatattaaatggct

SEQ ID NO: 884373 - DNA, 99 bp, Homo sapiens
gagaaattcgactatggcaacaagtacaagcggcgggtgccccggaattaaggtgaaaagcactgaagttgagatcctagagaagtctcaaattgaagc

SEQ ID NO: 884374 - DNA, 98 bp, Homo sapiens
aagaagtatttgatgtcttagagaaacttggagaagggagttagaacaggaattagccgagcagaagagtctccttcgctcagtagccagtcgtggag

SEQ ID NO: 884375 - DNA, 100 bp, Homo sapiens
tctaacgctgcctttgctttaaaacagtattacttgcggtgggctcggtggtggccgtgggctggatccgctcccgcaaggctgtggactggcgcctctt

SEQ ID NO: 884376 - DNA, 99 bp, Homo sapiens
taatgatgatgctcagtttgatgcgtcacactacgacagtgagaaaggagaccagttaaagaccctgcagaggaattacggcaggctgcagcaggatgt

SEQ ID NO: 884377 - DNA, 98 bp, Homo sapiens
gtgagaaggccgctggctcctgagaaatccccctcctccagtgtaaggcaaacattggtgggcaccgatcttcctgttcattctgcaagaacccaaga

SEQ ID NO: 884378 - DNA, 99 bp, Homo sapiens
agctatgcaaatatagaacactaaagtgttacatgacagatgtatgagtggaatgcagtagccctctgggcctgggatattgtggttgataactgtgcc

SEQ ID NO: 884379 - DNA, 74 bp, Homo sapiens
atgaatgggatattcaggttcatgttgcaaatcacatgattggatccaaggattctgtagctacaatgttgtca

SEQ ID NO: 884380 - DNA, 76 bp, Homo sapiens
cggtcagcggacttcgtggtagaatccattggctctgaagtggggtctctgggttcaatggataatacagttcgat

SEQ ID NO: 884381 - DNA, 100 bp, Homo sapiens
aggcccaagccttggagtaatttacctgaagagtgacaccattgattttgaaactactgggatcctttcagatgatcatgggctggccgctgccctctgg

SEQ ID NO: 884382 - DNA, 99 bp, Homo sapiens
ccggaaggtgctcttctggcaggaccttgaccagccgagggccatcgccttggaccccgctcacggttacatccttaatgttcagtcaagcagtgatga

SEQ ID NO: 884383 - DNA, 99 bp, Homo sapiens
catcgtattcccggaatcagacggtgccccatagatggccagctttcccccgagggtcaacgagaaagagatcggttgaaatcacaaagattagacacc

SEQ ID NO: 884384 - DNA, 76 bp, Homo sapiens
cagaattgcaagggacaagtggccacactccctcagacctaagtcagtgttagtctaccactgtacatctggtaac

SEQ ID NO: 884385 - DNA, 98 bp, Homo sapiens
aaaagattcctttcttggcaactggaggtcaaggcgaatatttaacttatatctgcctgtcagtgattcgcctttgccagtctcatctcgtgtctgct

SEQ ID NO: 884386 - DNA, 98 bp, Homo sapiens
aatttgtctgcaaacctggagccagaaacattaccgtcatattccacccattactaaggaactttcgaaagaaggtaccacctatcataggtattacc

SEQ ID NO: 884387 - DNA, 99 bp, Homo sapiens
caagccttcacttgcaatactgctgatgcccccagtaaggatatctttgttaaattgacaacaatggccatgtatccctaatttgacaggacatgctga

SEQ ID NO: 884388 - DNA, 98 bp, Homo sapiens
cgagaccgtgaccgagagcgtgaccgagagcgcgaatatcgtcatcgttagaaggttgaaaacgaggagctgaggcacctcatgtggtcctcggtggt

SEQ ID NO: 884389 - DNA, 98 bp, Homo sapiens
gcagatctctttgggtggtctcagcttatctacaatcatatcacagcagtaacagagaagaattttgaaacaaaagattttcgagcctctctagaaaa

SEQ ID NO: 884390 - DNA, 98 bp, Homo sapiens
gataagcctgtaaaaattgacaagtgggatggatcagctgtgaaaaactctttggatgattctgccaaaaagcaatagtcgtggcagtgctgctgaat

SEQ ID NO: 884391 - DNA, 76 bp, Homo sapiens
caagagtccacaaagggacctgatgaagcgaagatcaagatcccaaagttctttgagctctgctctgatgctgttt

SEQ ID NO: 884392 - DNA, 100 bp, Homo sapiens
cgctggtcctgctcggctgcctcctggcctcgctcctgttctcaggacaagcagggcgatttgatgaaactgttatcgaagagagaagacaatgtgctga

SEQ ID NO: 884393 - DNA, 98 bp, Homo sapiens
ttggcatttggctttgcctttctggacacagaagtatttgtgacagctccttgtccgcaagactggatctggcatggagaaaactgttacctattttc

SEQ ID NO: 884394 - DNA, 98 bp, Homo sapiens
gactgccttccattgtgaagtctggttggttctggacattacacagcatacgcaactcacgaaggccgctggttccacttcaatgacagtactgtaac

SEQ ID NO: 884395 - DNA, 99 bp, Homo sapiens
tcctgaagaagattccactcgtggtatgagagtggataatataatcaactcctctgcctggtggtttgtgatgaaaatggttccaagggctatggattt

SEQ ID NO: 884396 - DNA, 99 bp, Homo sapiens
gttattgaatatcaagaggaggagttgttgggagatacatctggggactataagaaagctcttctgctgctctgtggagaagatgactaacgtgtcacg

SEQ ID NO: 884397 - DNA, 100 bp, Homo sapiens
atcacctttcgttgggcacaacaggaacgcttctcccgttggcaacggttacatcaagcctccggttccacctgcttctggcacgcacagggagaaaggg

SEQ ID NO: 884398 - DNA, 99 bp, Homo sapiens
agatgtaatgcaacgttgtgatctggaggcacatctcaaaaacaggaatgttccggagaatcacagcagctgccactaggctgttccgcagtgatggct

SEQ ID NO: 884399 - DNA, 98 bp, Homo sapiens
gatgcaagcaccagccttcagggacaagaaacagggggtctcagccaagaatcaaggtctgtgagctttacttctctatataatttgctgaagacaaa

SEQ ID NO: 884400 - DNA, 99 bp, Homo sapiens
acagacctggccaacctcagtgcagccaaccatgatgctgccatctttccaggaggctttggagcggctaaaaacctattatggcatcgtcaaagcatt

SEQ ID NO: 884401 - DNA, 76 bp, Homo sapiens
caagactatgaatctctgttccaaatgctttgctgggccacccgttcatcgtgcagttcaatgatggaaatgccgc

SEQ ID NO: 884402 - DNA, 99 bp, Homo sapiens
ttcttcaggaattataaagaagctgaagctaaacttctggagtttcagaagagccttgaaacgggaaggacaccactggtaccagctgcgccaggctct

SEQ ID NO: 884403 - DNA, 99 bp, Homo sapiens
gaactggaaaggactggaattgatttgggaacaactggtcgtcttcagttaatggcaagacttgcagaggaagtcggtgacctttgaggacgtggctgt

SEQ ID NO: 884404 - DNA, 76 bp, Homo sapiens
cttttcaggcatcctcatataattaaactgtccagtggctcctggacaactatgagacggctgagggcgtgagtct

SEQ ID NO: 884405 - DNA, 98 bp, Homo sapiens
gagccctcgcgacgcgcccggcccggagcccccagcgcagcggccgcggtcaccatggagtaacaagtatgaccctcccttggaggatggggccatgc

SEQ ID NO: 884406 - DNA, 98 bp, Homo sapiens
ccagatgaattctgggataagaaagtaacgcatttttgtttttggaaggagaaggatagacttggctttgaggtgaccatagccgatgactactcaga

SEQ ID NO: 884407 - DNA, 76 bp, Homo sapiens
gtggaagtccaagtcaaacgcagaaggactgcctcactgagcaaccaagagctcataggcggaagggacttgcctt

SEQ ID NO: 884408 - DNA, 99 bp, Homo sapiens
aaagccatcattcatcttactcttcttgctctcctttctgtaaacacagaacctaaggaaattagtggtcatacttctggtataaaaaaagctctgtgg

SEQ ID NO: 884409 - DNA, 99 bp, Homo sapiens
gcaccacctaacgctggccgacaacagcctggcgtccgccacggaacttagtgatttggcccgtgaccctccagcacaatgttctgcaggtccagttgg

SEQ ID NO: 884410 - DNA, 99 bp, Homo sapiens
cctctttgaaaagggactgaagaatgttaagcatggacccattcatatgactaatttaggtacaggcttctccagtcagaatgagattgaaggtgcagg

SEQ ID NO: 884411 - DNA, 98 bp, Homo sapiens
ttacttcttcctcaacaccagcaccgcagatgttgtcaaggtggcctaccaggaggccaggggtgtcgccatggtgttgtcagtgctaaagcattcat

SEQ ID NO: 884412 - DNA, 99 bp, Homo sapiens
aaacaaaaagttaaacaagcaagcctgccataagtgagaagaactctactacgatcgcgggaaccaccatgagtttgtgtccctggtgaaggacctggc

SEQ ID NO: 884413 - DNA, 98 bp, Homo sapiens
gtagctcttcactcctcagcgcgacgtcgtgtcgagttcccaaaaagctccgcaggggctgtagggaggcctaatgggattgtttgaaaaacgtcgct

SEQ ID NO: 884414 - DNA, 98 bp, Homo sapiens
cctgacacggccaccctactgcctggaggccggggagccgacgcctgacctgcactggttaaacatcataatcatgtgtgttggccgaatgggaatca

SEQ ID NO: 884415 - DNA, 98 bp, Homo sapiens
aaaaagacaaatacaagtgaaaaaaatagactaatggattaacgtccctgtcgtgtgacattttctggtgactgcttagaaaactgcacagcatctga

SEQ ID NO: 884416 - DNA, 99 bp, Homo sapiens
gatcaagctggaacaggagttccgatcgacccggtaccaagaaggggagtgcccgcggcagaccttttcacagatgctgctgagactgaaaaaatggcc

SEQ ID NO: 884417 - DNA, 99 bp, Homo sapiens
tcagcgtcgctggcagccgctgtacttgattttgcaagaacgaggctcaaggatgtgagggacacagtattgacagctgaagaaatgatttacgttttc

SEQ ID NO: 884418 - DNA, 99 bp, Homo sapiens
caggagaaaagccagtattgcttgtgctcctaacaacctgtctcttgttcgagaccgagttcggacaaaaatggaacgtgatatcttggtagaggttaa

SEQ ID NO: 884419 - DNA, 99 bp, Homo sapiens
ctgcctttgacctttttgaagcctttgcaaaagttttgctgttactgctcagtgtagtcacaccttgaataagaaatggaaaaccttgggatgttgata

SEQ ID NO: 884420 - DNA, 75 bp, Homo sapiens
accttcactctgggaaaaggcactgaagttgaaactgaccctcctccaggtagccagcagacagaaacatcttcc

SEQ ID NO: 884421 - DNA, 99 bp, Homo sapiens
ccgctcgtcagactccagcagccaagatggtgaagcagatcgagagcaagcatgtagagcgcatgaagtacaggacaataaagcttcctacacatatca

SEQ ID NO: 884422 - DNA, 76 bp, Homo sapiens
aacggtcggtgtccccggctgaggcagcgcggccgcagcagccctgaaggatgccaattctgcgcttctcagtaac

SEQ ID NO: 884423 - DNA, 76 bp, Homo sapiens
attggagtcagcagaactgaaatagggttttgactctgggaggagggctgccttatttggagcaccttaatctctc

SEQ ID NO: 884424 - DNA, 76 bp, Homo sapiens
gaaatgagacaattgaagctcaagcagagcttacagtgcaagctagagttgggaagacatcactgattatgtctct

SEQ ID NO: 884425 - DNA, 98 bp, Homo sapiens
cgcggcggccgcagctgccacaaaccaggacacttggtggggttcccacacaagctcctccacctcttgaagcaacttcatcatcacaaattatctgc

SEQ ID NO: 884426 - DNA, 76 bp, Homo sapiens
ccctggacatggaggagaaggtccgcttcaaaaatgcactcggtgatggaaagagagccactattctgaagaacac

SEQ ID NO: 884427 - DNA, 99 bp, Homo sapiens
tcacatccgatgcaccctttttgtcagattatcaggatgagggaattgaatgatctggcacgggaccctccagcacagtgttcagcaggtcctgttgga

SEQ ID NO: 884428 - DNA, 98 bp, Homo sapiens
aaggaagagagcactgcagccagtgaaaccactgagggcgagctgcatgtctccaaactcttcaaccatcccaatatcgtgccatatcgagccacttt

SEQ ID NO: 884429 - DNA, 98 bp, Homo sapiens
acggcggaggcagcggagccctgggccatcggtgggtgcgggaatttctgaatgatgaaaacaaaggcctggatgtactggtggattacctgtccttt

SEQ ID NO: 884430 - DNA, 98 bp, Homo sapiens
gccttcatagggacagccgcccctggtgcacacaccctcgtattctcctgcccttccccagccttcatcctccccaaggcagaggtgtgcgtgcggaa

SEQ ID NO: 884431 - DNA, 100 bp, Homo sapiens
tgatggaagcattgcagcagctgtagaagtgtgtcagtgcccaccagggtatactggctcctcttgtgaaaaagtttacaaagaggattttgagaaggag

SEQ ID NO: 884432 - DNA, 75 bp, Homo sapiens
gagacgcacagtctccgtgccggtggaggggcggccccacggcgagcatgagattatgcatgatgtgataaagaa

SEQ ID NO: 884433 - DNA, 76 bp, Homo sapiens
gagcgatgcaagctcggatccgagactggcagcatgagcagcatgagataaatttgcgcctcattttggtaagcgg

SEQ ID NO: 884434 - DNA, 99 bp, Homo sapiens
gcaaggtgaataaagaagtggagcgtgtcctgaaggagttccaccaggccgggaagcccatcggtggaggccatagtggagtttgactaccaggcccag

SEQ ID NO: 884435 - DNA, 75 bp, Homo sapiens
atactatcagaccttattttcctaaggatgagatgacttgcagggtgcacagtcagaaattgaggcaaagcaaga

SEQ ID NO: 884436 - DNA, 99 bp, Homo sapiens
ttgatgaattgcaagtttgtgccccatagctgcacaggcaattaagttggaatatgcaaggttggttaagttggcccaagaagacaccccaccagaaac

SEQ ID NO: 884437 - DNA, 99 bp, Homo sapiens
tttgcatgtcagctttgtaatcagaggagcagagcagaggacaacttgtagaagacatgaccattaagagacatcaacttcgcaacaaatataagacaa

SEQ ID NO: 884438 - DNA, 100 bp, Homo sapiens
ctccggctcaagtgtgtcaagcaaggcaatggacctcatcatgaccgttgctgtacttacaatgaaaacaacttggtggatggtgtgtattgtctcccaa

SEQ ID NO: 884439 - DNA, 98 bp, Homo sapiens
cagtgactctgcacccagcaatccctctgcagacagctcccacaggagtcatgcccagtgtgtgaaggtactgtccaagaagctggaacattattatc

SEQ ID NO: 884440 - DNA, 99 bp, Homo sapiens
gaatgccagtgcatcttttgcacagctgccaagtcctgtatctgccatgtctgtggcgtccacctcaacaggctgcattcctgcctctactgtgtcttc

SEQ ID NO: 884441 - DNA, 99 bp, Homo sapiens
cagattccctggataccctttcagaaatttcttcaaataaacagaaccattcttatcctgctgatttgaataggatgcacagacaaaatatagatgcct

SEQ ID NO: 884442 - DNA, 99 bp, Homo sapiens
ttccatcatggcgtcaatgcaggaacccctgagacagacatagattctagctgcagcagatacaccctcaaggctgatggaacccagtgcccaagcggg

SEQ ID NO: 884443 - DNA, 99 bp, Homo sapiens
ttgcatgtttgatgtttcatccttcaatcagacacaagcttggaaatatggttacccattcaaagacctgcatagtggagccgccaccaaaatgcagat

SEQ ID NO: 884444 - DNA, 75 bp, Homo sapiens
cgctgcactaacgcaggatccggctgccgaaggtcctcgccaggttcagcttgttggtttagatgaggagagttc

SEQ ID NO: 884445 - DNA, 98 bp, Homo sapiens
tccgtgacgctgagcgaggcggagaaggtgtacatcgtgcatggcgtccagtgtggacaacagtgagtatatgcggaatggagacttcttacccacca

SEQ ID NO: 884446 - DNA, 75 bp, Homo sapiens
gtactatcgtctatcattggatgaagtggctccggagattgtgcaacttgctttggtgtttgctgttttattgcc

SEQ ID NO: 884447 - DNA, 98 bp, Homo sapiens
atacccatctcaaacctgggctttaaaatcacctcctctgggacgccttcctctacttctcacagttcagatcatccagacttgaaacatatcgaccc

SEQ ID NO: 884448 - DNA, 99 bp, Homo sapiens
ccagatcgggatttacgtggagatcaagcgcagcgatgttgtcgccgtgatcctgaaggcgctgacctacgacgagaagcggggtgcctgcagcgtggg

SEQ ID NO: 884449 - DNA, 98 bp, Homo sapiens
ttggttctcgccattttaaccttagctttatggaagatgccttcaattaagttgcagagttctgatggagagatatttgaagttgatgtggaaattgc

SEQ ID NO: 884450 - DNA, 99 bp, Homo sapiens
gtccgccgccgcggtggcagtcagcagccggcagcagcagcggcgtcatcacgtagacataaccaagaaacttcacccaaatcaagctggcctggattc

SEQ ID NO: 884451 - DNA, 99 bp, Homo sapiens
gtttgtgagcctggactcgccctcctatgtcctgtacaggtcattgattacaacggggaacgcacgctggatggttttaagaaattcctggagagcggt

SEQ ID NO: 884452 - DNA, 98 bp, Homo sapiens
cctcgctccctctgctcttcctcccttcgctcgcaccatggtcatcatcagatttgaaatatttaaagtggatacaaaactatttcagcaatgcagac

SEQ ID NO: 884453 - DNA, 99 bp, Homo sapiens
ctgtgcaaccccagggacctggaaagacagacaggatggggaggaggttcttcagtgtatgcctggtgaccaagaatatggcccaggtgaccaaagccc

SEQ ID NO: 884454 - DNA, 98 bp, Homo sapiens
cagccaccaccgccaccatgtcctaccaaggcaagaagaacatcccgcggatcacggatacgggaagaagaaatggctggtgatctttcagcaggttt

SEQ ID NO: 884455 - DNA, 99 bp, Homo sapiens
ggagccatggcggagtcggcgcctgctcgggtctctaattaacagaagatggcaaagcccagccacagcagctatgtccttcagcagctaaacaaccaa

SEQ ID NO: 884456 - DNA, 99 bp, Homo sapiens
tttggggcatctccgcggtccggcccggggccccgggatctcggctgtccttcctcccgctgctccagttgatgtactaaaagcactagattttcacaa

SEQ ID NO: 884457 - DNA, 99 bp, Homo sapiens
ccagagggacttccgcaacaaaccctatcctgtccgagcaaagattacctattaccagaacacactgacagtgaatgaaaactttgccattgatttgat

SEQ ID NO: 884458 - DNA, 99 bp, Homo sapiens
agagcgtgaccgagagcgcgaatatcgtcatcgttagaaggtgcatcatgggcttcatcagcaaggagcgagagcgtgccctgttgaaggaccagcagc

SEQ ID NO: 884459 - DNA, 99 bp, Homo sapiens
aacatctcctgctattccttgggctgcctttcctgcaggagaaccagcagaaatccaccaatgtagtctatcaggcccaccatgtgagcaggaataaga

SEQ ID NO: 884460 - DNA, 99 bp, Homo sapiens
tcaggtctggagctcgaccgggccaggtgtgatgaatgcagactctgctaccattttggctgtttggatcctcctttgaaaaagtctcctaaacagaca

SEQ ID NO: 884461 - DNA, 99 bp, Homo sapiens
acaagaatccactgttgctactgaaagggtcttctggatttggcgacatcttactgtgaaaacagactgaaaaaactttgtcagcacattatcaagaga

SEQ ID NO: 884462 - DNA, 98 bp, Homo sapiens
ggagccgctgcccgaactcccggcccgaactccagattctgcatatacagactcatgaaaaattcatcagagatagtcaagaaaaaccaaaacctgta

SEQ ID NO: 884463 - DNA, 100 bp, Homo sapiens
ctcccgtggcaaaagagaaggaagtgctagcggtgatgtctgctccaatgaggatctccctgaagttgagctggtgagtctgctagaagaacaactacca

SEQ ID NO: 884464 - DNA, 99 bp, Homo sapiens
aaaagaagtgttaagaattgcctttgggactctgaaggctgaagatctttgtagaatttgatggctgtaactggaagcaacactcctgggtaaaagttc

SEQ ID NO: 884465 - DNA, 99 bp, Homo sapiens
gcgtccagctcgcccagctcgcccagcgtccgccgcgcctcggccaagaacatgaaaggctcccggagcagcgctgactcctccaggaaacactgaggc

SEQ ID NO: 884466 - DNA, 100 bp, Homo sapiens
ttgattgctacaagtacttggaacctttgtacaatgactatcgaaaaatcaagagccagaaccgaaatgggggagtgtatatgacaggaaaagaacttcg

SEQ ID NO: 884467 - DNA, 99 bp, Homo sapiens
agaagtacaatagcattcgcggtactggaagacactgggatgcccatggacgatgatcagtatgccctgctgaccactaaaataggcttcgagaaggaa

SEQ ID NO: 884468 - DNA, 100 bp, Homo sapiens
gaagcccttcaccaacaaagatgcctatacttgtgcaagagatctctttgctgccactttcctcattaagaatggggcctttgtcaacgctgctacactg

SEQ ID NO: 884469 - DNA, 100 bp, Homo sapiens
tcatgaagcagacgatggtggattcctcctgtagaatccttaccagtgacgtcttccaggactgcaacaagctggtccactggtctccacataatgaaac

SEQ ID NO: 884470 - DNA, 98 bp, Homo sapiens
agaatggaactgtatgccagcagcttgttgtacaggagttctgggaaatcgttcattcatttacagatgaacagaaaagactcttcttgcagtttaca

SEQ ID NO: 884471 - DNA, 98 bp, Homo sapiens
ggggccggaggagtcagctgtgtgtccagaacgtgccatggagacgcttaacggtggattctccacagttttcctcgtgcgtactcacggtggaatcc

SEQ ID NO: 884472 - DNA, 76 bp, Homo sapiens
gaccaaagcattcctcttctatgcggagctccctgggtcctcagcagtgaggctggcctccctgcgtgacctgccc

SEQ ID NO: 884473 - DNA, 99 bp, Homo sapiens
aaattattgtttgcacacctggtcgaatgattgacatgttagccgctaacagtggcatatcacacctgaaaaattttatgtggaagcttgtgatgatgg

SEQ ID NO: 884474 - DNA, 99 bp, Homo sapiens
caggatagaagagtcaataactgaagacttaagtctcttgcatggcaccaagaatgttaccaattcaagcagtttaagattgccaagacaaaatagtga

SEQ ID NO: 884475 - DNA, 99 bp, Homo sapiens
tcacctcctccaagaccgtgctggtctttctcaacctcatcttctggatatgttgatgatgtgatcagccgcattgacaggatgtttcctgaaatgtcc

SEQ ID NO: 884476 - DNA, 98 bp, Homo sapiens
ggaagccctgagggcagctgttcccactggctctgctgaccttgtgccttgattgatatagaaatcaacggcagtgcagtggatcttcacatgaagtt

SEQ ID NO: 884477 - DNA, 100 bp, Homo sapiens
atctcaacatccaaacccctgacagccctgtcagataagagaccaaactatggggaaatccctgttcaaggtgccgtgtggacaggcgacaacacagcag

SEQ ID NO: 884478 - DNA, 99 bp, Homo sapiens
tgagaagggccggcggattcgggaactgactgctgtagttcagaagaggtttggctttccagagggcagtgtagagccgtgctggtatagaggactcta

SEQ ID NO: 884479 - DNA, 99 bp, Homo sapiens
accagcaagaggatggggccctggatgagggggaagggcctcaaagccagaagaactttacagactagcatggcaaagcttctctccgatcttagtgtg

SEQ ID NO: 884480 - DNA, 75 bp, Homo sapiens
ttgaagcaaaagtttgatgagattttttcagcaacaaggcgcttcatctaattgatgaaatggatttgaatggtg

SEQ ID NO: 884481 - DNA, 98 bp, Homo sapiens
tggcatccaatggaactcaaaggtgttggggatgtcctttgcactgaccctgaactgccagattgacaaaaccagccagaccatagggctatgatctg

SEQ ID NO: 884482 - DNA, 75 bp, Homo sapiens
aattgatcccaagttgtcgacgaccgacagggtggtgaaagatgtacattgaagatgtcagtttctacatgtggg

SEQ ID NO: 884483 - DNA, 98 bp, Homo sapiens
aagcgcaaagaggagaatgaagatccagaaaggaaaataaagaagaagggcttcggcgccatgctgaggtaacagtcctttggacagcccccggaatt

SEQ ID NO: 884484 - DNA, 99 bp, Homo sapiens
ttgagagcttctcagactatccacctttggggatttttgcacgagaacatggatcaaataagaaattggcagcacagtcctgtgccctgtcacttgtca

SEQ ID NO: 884485 - DNA, 74 bp, Homo sapiens
gtttttgattcaagtcctgttctacctactgccaattggaaaggtacgagtggctgctttacagaatctggtga

SEQ ID NO: 884486 - DNA, 76 bp, Homo sapiens
aaaacaacttcgagggcagagatctctcaccccgtcactcagggtggcgcaatcacgactcattggctcactgcag

SEQ ID NO: 884487 - DNA, 99 bp, Homo sapiens
acaatcccagttcctaaaggaaagccactggctcttgtagaagaaatcagaaacagaaaggatgtgaaggtgtttaattttggaaattttagcattcag

SEQ ID NO: 884488 - DNA, 99 bp, Homo sapiens
cattctgccgaagagaacaagacgtgtgaagactcagcacccttacatctatcgggttacctttgccacagctaatgaatcctcagcgttgctaattag

SEQ ID NO: 884489 - DNA, 99 bp, Homo sapiens
tcccatcttccactccagtagccaattctggaaccaaacccaagactacgggtgatttcacctggaacagcatgtcaggccgcagtgtacggctgaggt

SEQ ID NO: 884490 - DNA, 100 bp, Homo sapiens
aaatggatgagcaagacctaaatgagcctcttgccaaagtgtcccttttaaaagctttatcttcaagccaggatgaagggagactgggcaagactcttac

SEQ ID NO: 884491 - DNA, 76 bp, Homo sapiens
aacgtggcggatgtggtgaaagaataatcatgggccagactgggaagaaatctgagaagggaccagtttgttggcg

SEQ ID NO: 884492 - DNA, 99 bp, Homo sapiens
agctacttgggactcctctctcaagagaagctgcaagagcaacatctttcctcaccccaaggcaggggaaatggaaggtgatgcagtcgaagccattgt

SEQ ID NO: 884493 - DNA, 99 bp, Homo sapiens
gcagggacagggagctggttggggaggaccagaaatcagaattatatccagatcgagagacagaagattctgaaagggttcaatgaaatgagagtcatc

SEQ ID NO: 884494 - DNA, 98 bp, Homo sapiens
tcgaatcattctttgtacagaaattgaaaggcttcaaagctagcaggattttctgccgtctcttggcaaaaatggcaaataatgatgctgttctgaag

SEQ ID NO: 884495 - DNA, 99 bp, Homo sapiens
ttgaggaagaaagaactcaagtacaacccaatgaggtttatgccagttcaagtaccaaatgatgaagaaaaaaatgatcctgtcctttttgccaataaa

SEQ ID NO: 884496 - DNA, 99 bp, Homo sapiens
tcagctcggcagtcgcgaagcagcaaccatgtgtactaatggtcacttgatgtgcgctggctgttttatccacctactagcagatgcccggctgaagga

SEQ ID NO: 884497 - DNA, 99 bp, Homo sapiens
ggatggtcaagagcgtgccctacttcaaggataagggtgacagcaacagctcggcgggctggaagggaaaactgaggctgccatcaaaaacttcagtcc

SEQ ID NO: 884498 - DNA, 100 bp, Homo sapiens
gaaaaacatcttgatctggagaaaaactggatgttggtagaaaaagcaagagtttgttatatagcaacagattatgagggacaagccaagaaactcctgg

SEQ ID NO: 884499 - DNA, 76 bp, Homo sapiens
cctcagtgctgccagccatctgaactgccggctgaatggagatcaaaacgtggagtacaaggggaccgtctggcac

SEQ ID NO: 884500 - DNA, 75 bp, Homo sapiens
aggaaagaaaaggagtcaggaatgcctcttagaaatgatgtgctcacgggtgccctctgaacagtcttctggtac

SEQ ID NO: 884501 - DNA, 75 bp, Homo sapiens
cgccatcccaccagagcacggcaagcgcctggagcggctggccatcgataaggatgacattcggctgctgccgtc

SEQ ID NO: 884502 - DNA, 98 bp, Homo sapiens
tgaagtggcaggaggaggaggaggggctccggctggtctgtggtgagccacctggacgtcaaatgattgccatcagaaagagacaacttgaagaaacc

SEQ ID NO: 884503 - DNA, 99 bp, Homo sapiens
gggcatgtaaggtgcgcggagggactgcaccttctccatcaggtgcagaaggctggacgtaaagaaagaagtgatgcactcaattctgcaatagataaa

SEQ ID NO: 884504 - DNA, 100 bp, Homo sapiens
actggacaaatggtcttttcagagacagttatcacatctgtgggagacgaagaaggcagaaggagccactgttaccgggacttagctctggtgagtcgtg

SEQ ID NO: 884505 - DNA, 99 bp, Homo sapiens
ccaacagtcacacatgtacattacaggcttgaagaaaatttgcctacacgttgtggattttgtcatataccatatgatgaactgaatatgccatttcca

SEQ ID NO: 884506 - DNA, 99 bp, Homo sapiens
caggggctggtgaccgagcacgtcttcttactagacaagagcaagcaccagaagcaccaggcttttgaagcagagctgcatgccaacgctgaccggatc

SEQ ID NO: 884507 - DNA, 99 bp, Homo sapiens
ggggactctgtgtgagggaaagaaaacaatttctcctgctctgcagcttctgttcagtgaaggcattggagtctttcagcaatcttctaaacaaagtct

SEQ ID NO: 884508 - DNA, 75 bp, Homo sapiens
ctgataccagcgtgcaagagacagaccggatcctggtggagaaggtacagaggcgggtggagcagctggtgttgt

SEQ ID NO: 884509 - DNA, 99 bp, Homo sapiens
catgtgcccatttatgcagttcatcgaaggaggaaggagatatcagtgtggattttgcaactgtgtgaatgatgcttctacagatgacagtgcagctga

SEQ ID NO: 884510 - DNA, 99 bp, Homo sapiens
tgggcttctctgaggcggcgagagatggtcaggtctggagctcgaccgggccaggattaatggggaagtttctagcatttcatcaaaatttgaaactga

SEQ ID NO: 884511 - DNA, 99 bp, Homo sapiens
ttcggtgtccaagctcaccatccacaacatcactccaggtgatgcaggttgtctgcattcaaaagagcattctattaaagctaccttaatttggcgctt

SEQ ID NO: 884512 - DNA, 98 bp, Homo sapiens
aggcggcggcggcgagcggttccttgtgggctagatgcctgaggaaacccagacccaagaccaaccgatggaggaggaggaggttgagacgttcgcct

SEQ ID NO: 884513 - DNA, 98 bp, Homo sapiens
tgtgtgatatgcaggaactgagaaatagcctgttccaaagacctaatgcgcttgctgtccagcagttgacagctgctcagcagcagcagtatgcactg

SEQ ID NO: 884514 - DNA, 100 bp, Homo sapiens
gatcagatactggctgtagatgatgaaattgttgttggttaccctattgaaaagtttgaaggaagaaagtactgtgaacatgactttcagatgctctttg

SEQ ID NO: 884515 - DNA, 99 bp, Homo sapiens
tgggataaacagtgtgaccgatgtcatatgctaggccactatacagatatggaagtttactgttctgattttcatgctgaaagagcagcgagagagaaa

SEQ ID NO: 884516 - DNA, 99 bp, Homo sapiens
gtaattctgatggcgaatgggtgtataacaccttctgtatctatgtgactccctgcatgtctcctctgccacatgacagtcctttaatagagaagccag

SEQ ID NO: 884517 - DNA, 99 bp, Homo sapiens
aggaactgaccctgctctctcctttccctgttagacatggcagtgccctactccagggattacaaaagaaagtatgagttcttccgaagaaagttgaag

SEQ ID NO: 884518 - DNA, 98 bp, Homo sapiens
ttccctctcccaacatggcggcctcaggtgtggatgaggtcaccattgtcaacattttgaccaaccgcagcaatgcacagagacaggatattgccttc

SEQ ID NO: 884519 - DNA, 98 bp, Homo sapiens
ggcaaagctcaagatggcggacaaaacgccaggcggatctcagaaggccagttcaaaggcagaatccagagaccacatttgaagtatatgttgaagtg

SEQ ID NO: 884520 - DNA, 75 bp, Homo sapiens
cctagtgcgccagggcctcaagtgcgatgactggtgtcgttcagtatttctacattgaagactggcaattcgtta

SEQ ID NO: 884521 - DNA, 75 bp, Homo sapiens
gatcagatgcatcatggaagaatgatcaggaaccaccaccagaggaggactggaatgaaattgaccccattaaaa

SEQ ID NO: 884522 - DNA, 98 bp, Homo sapiens
agcggccccggcccggcccccgcccggccccggcgcaggcagttcaggtgctgacggccacccaccatcatctaaagaagataaacttggcaaatgac

SEQ ID NO: 884523 - DNA, 99 bp, Homo sapiens
tccggggaccatggggctcctgaccattctgaagaagatgaagcagaaagagcgggagctgcgactgctcatgcttggttgccacatccaagaagaacg

SEQ ID NO: 884524 - DNA, 99 bp, Homo sapiens
tgttcaactcccctcaccagcgagtgaagcaaagcacggagaaactcccatgtatggaatcccactgtatgatttataaacagacaatatgtgagtgcc

SEQ ID NO: 884525 - DNA, 99 bp, Homo sapiens
tgcgcacgccgagtcctactccagcggcggcggcggccagcaggaaattctgaaacagccacacctacaaatgtagacttgcctcaggtcatccccaag

SEQ ID NO: 884526 - DNA, 76 bp, Homo sapiens
tattgccagagcaagagctggatctcgtctttctacctgtcgcgaaatcgcctttcagaaattcctatagaagcat

SEQ ID NO: 884527 - DNA, 98 bp, Homo sapiens
acagctgcaagctgaaaagtgcctgcaatttgccatttatttgtaataagcactgcaggagtttgtgaccaagaacttcaagagtcaagacagaagga

SEQ ID NO: 884528 - DNA, 99 bp, Homo sapiens
tcttgggcagcatgcagtgctttctgggtactgcataagccgaccacagtataagacttcttgtggcatctcttcattaatttcttgttggaatttctt

SEQ ID NO: 884529 - DNA, 99 bp, Homo sapiens
gaaagcaccatgacgtccatccatttcgtggttcacccgctgccgggcaccgaggaccagctcaatgacagttgttcttcctaacataaaatcagaaga

SEQ ID NO: 884530 - DNA, 98 bp, Homo sapiens
cctagcgttagaagcgagctggaatgcgtgaccaacatcaccctggcaaatgtcatccgacagctgggcagcctgaatcactttgggaagcagtgaca

SEQ ID NO: 884531 - DNA, 99 bp, Homo sapiens
cctgagggctgctattgtatatcacactaaagtcacccacaaaagctgtatataatgccagacattggaatcatccagattcagaagaactgcctgggc

SEQ ID NO: 884532 - DNA, 98 bp, Homo sapiens
agaaagtgcactgactggtggtgtcaacccatggctcaactggaagcactgtggaagaagatggagggtgtggtgttgacttcaaaatcaaaactgta

SEQ ID NO: 884533 - DNA, 99 bp, Homo sapiens
gaaacctgggggctccctggacaactccgagcaggcatggaaattttgggaaatctttgcaaagcagaagataatggtgttttaatttgtgaatatgtg

SEQ ID NO: 884534 - DNA, 76 bp, Homo sapiens
cagtcgtcaacaagatggtgagcatgatggagggtgtcatccagaaactaatctggattcactccctctggttgat

SEQ ID NO: 884535 - DNA, 99 bp, Homo sapiens
gagaaactgcagcgagctgcaattgcccagaaaaagattctgctctctttgctgaactcggttatttcacagacactgatgagctgcaattggaagcag

SEQ ID NO: 884536 - DNA, 76 bp, Homo sapiens
atctattgaatttgggtacatggttgtggggtgatcatgggcaagaggctttagaatctgctcatgtttgcctaat

SEQ ID NO: 884537 - DNA, 100 bp, Homo sapiens
ggagcccagctgaaatggactggcccccttgagcctgtcccaagccctggtgccaggtgtccatccccgtgctgaggtatgcccaagaggacagagaacg

SEQ ID NO: 884538 - DNA, 100 bp, Homo sapiens
ctggaatttattactacctgatgcagaaccgcatgcacgaatccctgaagctttttgacagcatctgcaacaacaaatggttcacagacacgtccatcat

SEQ ID NO: 884539 - DNA, 99 bp, Homo sapiens
aggtgacagccctgccccccaaggaagcgtgcaaatgccagaaagaggatttggccagagcgttttgtgtctagcacataccgctccaagggctttgac

SEQ ID NO: 884540 - DNA, 76 bp, Homo sapiens
gtttgcttccccttctaccatgattgaagaggatcacctagcccgggtagaagaggcaatcacccgtatgcttgtg

SEQ ID NO: 884541 - DNA, 98 bp, Homo sapiens
gaaaacctccttatgctgatatacatccaatgagggagtacgagacccaatctagtgcagaagccaaatttgtgaagcagctagaccaatgtgaaatg

SEQ ID NO: 884542 - DNA, 98 bp, Homo sapiens
cctctgacttgcagatgctgtgagatccagagctaagactccacgacatcccggaagccgaaaaatggggcagggtgttcccctgatatcagtgacta

SEQ ID NO: 884543 - DNA, 99 bp, Homo sapiens
ggccatcctgcacctcgtagtggcagacttgtgcaccatggacaattttgctgagggagatttcactgtggcggattatgccttgttagaagattgccc

SEQ ID NO: 884544 - DNA, 98 bp, Homo sapiens
gctgacgctgcgcagccaagccctggagctcaacaagcggaagtgtgtaatgctgtgtcatggagctaaaatcggatttttccaaggagatatcaggc

SEQ ID NO: 884545 - DNA, 99 bp, Homo sapiens
gcaagcggatggagtgcccaccagagtgtccacccgaactgtacgcactcatgagtgactgctggatctacaaaacaagttgaaatcatcgcagaagga

SEQ ID NO: 884546 - DNA, 76 bp, Homo sapiens
caacaataacaagactgtccttcggacaagttttaggagcgtgaggatcatccccggagaggacgggaggatcggc

SEQ ID NO: 884547 - DNA, 98 bp, Homo sapiens
tgagacagaagacatggcggcctaaccacccgcaagccttcgtggggagcgttcgcgaggcgagaaattaggcaacagctagcagaaaaagctaaagc

SEQ ID NO: 884548 - DNA, 99 bp, Homo sapiens
tctccataagtttacccctttacattgggcagcacattctggaagtttggagattctttcttgtggagaagttattcatgtgaagatccttggaatttt

SEQ ID NO: 884549 - DNA, 76 bp, Homo sapiens
gcatcccacattaagtcaacggagccagatgaccaagatgctccagatgaacatgagtcgcctccacctgaagatg

SEQ ID NO: 884550 - DNA, 99 bp, Homo sapiens
tacaactcgcccaccacgtccagcttcaccacgcggctgcacaactgcaggaacaccgtcacgctgctggaggaggacattcggaaattctttggagta

SEQ ID NO: 884551 - DNA, 99 bp, Homo sapiens
aggttaacctgccctcttaactcagcagtggttctagcgtcctatgccgtacaatctctgaggaagtgctcagatctggaaaaagctattgccaccact

SEQ ID NO: 884552 - DNA, 98 bp, Homo sapiens
gaagcatcgaaagcgttggagaggtgttaccggaacggcggcgacaagggtgttcccgaactagagtggaatgattttattcaagcaagcaacttatt

SEQ ID NO: 884553 - DNA, 74 bp, Homo sapiens
ggatggttgtgagggatgagaaaagaagatggactctagagccaatggccaaaggccctgccaagaattcagaa

SEQ ID NO: 884554 - DNA, 98 bp, Homo sapiens
gtctacgagctgtttctcatctttatactcttccaggttttgcacactagggaccaagaagccctcggggacactgctgagaaaagactgccgaaggg

SEQ ID NO: 884555 - DNA, 75 bp, Homo sapiens
aaatgatgatggaaatgaagtataataccaagaaagccccacttgggagaagatagcattcttcacaaggccaag

SEQ ID NO: 884556 - DNA, 99 bp, Homo sapiens
accagttcccgcaagcccagacaatgccggtggaggaatttgtggctggctggatctctggtaacctgtgtatggtgactggaggtgctaacctaggaa

SEQ ID NO: 884557 - DNA, 98 bp, Homo sapiens
aggcctcagtaatattacccattctgaagaaaaaactagccttcctttcaggagcctccagaagatgatgcaaacatcattgagaagatcctggcatc

SEQ ID NO: 884558 - DNA, 100 bp, Homo sapiens
ggactgcctccccacaccaccgaccaggacctggtgaagctctgtcaaccaaattccgggatttctttaatcaaaatgaaaccagtgatccagcaaggga

SEQ ID NO: 884559 - DNA, 99 bp, Homo sapiens
ttgaacttaatacagcaagaaagaccatcaagtttaccagtgaaagaacttgtcctggacaacagtcggtcgaatgaaggcaaactcgaaggcctcaca

SEQ ID NO: 884560 - DNA, 76 bp, Homo sapiens
ctgaaccagggatcacagtctaaggtccagatttgataatgggctgcattaaaagtaaagaaaacaaaagtccagc

SEQ ID NO: 884561 - DNA, 75 bp, Homo sapiens
ggctggtacatcttccgcgtgctgctgcaggatggggaatttagcatggatcttcgtaccaagagcaccggtggg

SEQ ID NO: 884562 - DNA, 98 bp, Homo sapiens
ggcttgagagctgggttctattttccctcctcaaactgactttgcagccacggagagactattgcagatatcatccgaacatgtttgggacccaagtc

SEQ ID NO: 884563 - DNA, 99 bp, Homo sapiens
ttggatctacactttctcaagcactgtgatcttcaaatgggctttgttatgcacctaaagccatattggaagctccagaagaaagagcaccccccggaa

SEQ ID NO: 884564 - DNA, 100 bp, Homo sapiens
caacagtaagccttcgtcactgccaaccttagatgttttacgaagtcataatgaagcctgccaggaaaacaaagatttacaaccttacatgcctattcca

SEQ ID NO: 884565 - DNA, 99 bp, Homo sapiens
gagcagagcagacttgatcaagcagtatggaagatgggccgttgtcagcggtgatggtgccaatgatgttagcatgatacaagtggcagacattgggat

SEQ ID NO: 884566 - DNA, 76 bp, Homo sapiens
ggccgagcgcgagcagttcgacaagacccagggggcagatggcctgtcggagccagagggcatctctctgaagcgg

SEQ ID NO: 884567 - DNA, 76 bp, Homo sapiens
cccagtcccacttcaaacattcgtctcggaaaccccgcctcttacagtcacgagcatccacccaacccaccagtat

SEQ ID NO: 884568 - DNA, 76 bp, Homo sapiens
cgaagtactaccacgcagacatggggaaggttctggaaagttctctgtggcgcctggagatttgaaaaagagaatt

SEQ ID NO: 884569 - DNA, 100 bp, Homo sapiens
tctgaaggccacattaaactcactgactacggcatgtgtaagatggtttatgggagaaatattagccagtgtcttcacatgctcattgatgataactgta

SEQ ID NO: 884570 - DNA, 99 bp, Homo sapiens
tccaagaagcccatgtggcctataccgccagtaccgcctggcgggacactacacctcagccatgctatggaatgtctgatcacagatacggggatggtg

SEQ ID NO: 884571 - DNA, 99 bp, Homo sapiens
ggacacagcctcgctggaggcagtttctgacttcaaatctcaacctgagccatccccagttcttagccagttgagccagcgacaacagcaccagagcca

SEQ ID NO: 884572 - DNA, 98 bp, Homo sapiens
aagcctgaggtccccacaggagacgtagaagaggagagacctcccagggacgtgcactcagaaagggcattcttagcagggttacagaatctgttaag

SEQ ID NO: 884573 - DNA, 98 bp, Homo sapiens
agaagcccggcgacggaggaacgcaggtctgctgccagatgctattaaactacagctggttgaagcaggcctagtagagtgtctactagagattgttc

SEQ ID NO: 884574 - DNA, 98 bp, Homo sapiens
caggctctatggcctgcaggaagcgctggaaatagccagagagatgtcccaccaggatatttgcgatatactccagagtcactctggagggacctgat

SEQ ID NO: 884575 - DNA, 75 bp, Homo sapiens
ctacaagaggggacaagtacctttatgaaccagtgtatcccaaccgataacagtagaactctgaacgtggattcc

SEQ ID NO: 884576 - DNA, 98 bp, Homo sapiens
agagggggagtgcgcggcggccgcagctgccacaaaccagggcgaactttctgaccaagtatacaactacccagagggcctaggagaagtgctgtata

SEQ ID NO: 884577 - DNA, 98 bp, Homo sapiens
ccaaagcgagcgaagctagggtcgccgccactgccgcaggaggcgtgaggttgaaatcacaaagattagacacctttttagataggtgttcttcagca

SEQ ID NO: 884578 - DNA, 75 bp, Homo sapiens
gggcccgtagctgggctctgcgaggtctatgttaacaatgaatgggcaaccagtgttggggaaggagggagcttt

SEQ ID NO: 884579 - DNA, 99 bp, Homo sapiens
gctttcctcaccggggcttgctgttggatacatctcgccattacctgccactctctagcatcctggacactctggtattactgtctctaagccagacct

SEQ ID NO: 884580 - DNA, 98 bp, Homo sapiens
ggatgaccgctttaagccggagcgaggccaccgaggagggcgggtcatcatcagatttgaaatatttaaagtggatacaaaactatttcagcaatgca

SEQ ID NO: 884581 - DNA, 75 bp, Homo sapiens
cagtaactgaacattggtctaaagtctttccaaaaggtcaaggttcacaaggcatggaagaggagatggttcgtg

SEQ ID NO: 884582 - DNA, 75 bp, Homo sapiens
ttaccgaacatctcataaataaggagtcttttagtcctgctatacagctgcaccttgtacatcaagctccatgta

SEQ ID NO: 884583 - DNA, 100 bp, Homo sapiens
atatggtaggttcatgtctgtaagcatcctgttgatgggcatcgtgggaccaattactgctggaatcttgacaaattacatgaagcagatgacatttgaa

SEQ ID NO: 884584 - DNA, 99 bp, Homo sapiens
ctgcttctgtccaatcaggctttgcatcccgggacgcttccggttatggcgtcattatgcagccaggtttcatcaagaccaacttctcctgaaaaattt

SEQ ID NO: 884585 - DNA, 98 bp, Homo sapiens
atcttaaaaaaaatagctcagttaatgaaggatcaacgtatcataaaaggagctggaaaatgcagaatttatccccatgcctgacagcccatctcctc

SEQ ID NO: 884586 - DNA, 99 bp, Homo sapiens
ggacgttgagagaacgaggaggaaggagagaaaatggcgtccacggaggatgttaaacgtctgaatgaaaaacttaaagaaagcaatacaacaaagggt

SEQ ID NO: 884587 - DNA, 75 bp, Homo sapiens
ctttaatcactgaccatcccaatatacagactgttcgccatggatttccctatcaaccctcagccctggcctttg

SEQ ID NO: 884588 - DNA, 75 bp, Homo sapiens
ctttggttacctatgtacctgttaccactttcaaaacttcacctgaacctaaaatggtgagcgagagtcaccatg

SEQ ID NO: 884589 - DNA, 100 bp, Homo sapiens
cagtcggcttctctacgcagaacccgggagtaggagactcagaatcgaatctcttctccctccccttcttggtctgcgcaggcatggcactaagtgtccc

SEQ ID NO: 884590 - DNA, 75 bp, Homo sapiens
gggtggggtcgacgacgaagacagcggagaggagagcggtgcggaggactgagatttgcaaaggagccagtgagg

SEQ ID NO: 884591 - DNA, 99 bp, Homo sapiens
agaggatggggccctggatgagggggaagggcctcaaagccagaagagaggtgagagacttcagaggctgccctttcttttcatctgctgcttgtgaaa

SEQ ID NO: 884592 - DNA, 99 bp, Homo sapiens
gcaccttaggaggccgaggcaggaggatccttgaggtcaggagttcgagaccagcctcgccaacatgagcactgcagtttcctcctgaaggctggctcc

SEQ ID NO: 884593 - DNA, 100 bp, Homo sapiens
cttgcccgagaacatccagtttgatgtttactacaagaataacaagcctttgtattcatttgaagataatgcagactatgtttatgatgttatgtggtca

SEQ ID NO: 884594 - DNA, 99 bp, Homo sapiens
tttaaacaagagatttccacagaaggaggaattttgttgtcagagaataaaaggaggttgtccataattgactttaagcagcaatcagtaaaacattga

SEQ ID NO: 884595 - DNA, 99 bp, Homo sapiens
atcccagaattcagcaacgatgttaatggggaggccaaagagacacagcccatttttttaggcaaggcatctttacatatgtgattatcataaaaactt

SEQ ID NO: 884596 - DNA, 75 bp, Homo sapiens
cttggcctctcctgggatcggcccaaggccagttctccgcagcttgctgatgaccgtatggcactggtgtcaggc

SEQ ID NO: 884597 - DNA, 98 bp, Homo sapiens
ttcgattcactaatgtcccagaaaggacacaaatagatgtaggcagaatacctttacagaggttaaaattggtgacagatcagtcagtgaaagcattt

SEQ ID NO: 884598 - DNA, 100 bp, Homo sapiens
gcaccacaccccgcacccgcaagatcctggagcagcagcaggctgcaaaagagtcatttgatgtggtcacaaaatgtgtgagtttcacactaactgagca

SEQ ID NO: 884599 - DNA, 98 bp, Homo sapiens
agacatgtcatcaactcagctgataatgctctaccacaagaaaatggcctctcacctggggccattgctggcattgtgattggagtagtggccctggt

SEQ ID NO: 884600 - DNA, 76 bp, Homo sapiens
ctcatgcaacaattacaagatctggaggaatgcaggggaagacggaatctatcactgtggtgaagctgctgagctg

SEQ ID NO: 884601 - DNA, 99 bp, Homo sapiens
gtcatcttcaaattggagcaaggagaagagccgtgggtaggagatggagaaattccaagttcagattctccagcatttcagcaggaacttgatgcaagg

SEQ ID NO: 884602 - DNA, 76 bp, Homo sapiens
agctgcagatgtactttgtattttacaagcaggtagcctttccagtaaatatatgactcagggaaaagcctcagcg

SEQ ID NO: 884603 - DNA, 99 bp, Homo sapiens
ttcacacatggagagatgcaagaccagtccatttggggaaatccttcggatggtgaactcattagaaaatttctagaaggaggagttggccatgttgaa

SEQ ID NO: 884604 - DNA, 99 bp, Homo sapiens
accttcccggcatcaccagggtggctgtggacaaccagccccgagacatcggactgcagttgtgattccaaagaatccctatcctgcctccgatgtgaa

SEQ ID NO: 884605 - DNA, 98 bp, Homo sapiens
ggttgccttggaaaatgccaacgccgtgtctgaagctggataaaaaagttatcagccaaattgcaatgaacgatgaaaaagcgaaaaacaagagtctt

SEQ ID NO: 884606 - DNA, 76 bp, Homo sapiens
ccgtggcaggagacaggctctggttacaggatgggtcatcagttaaggaagttgaaacctaccaccggacacgtgc

SEQ ID NO: 884607 - DNA, 75 bp, Homo sapiens
ggggaagaattacgagaaggcactggcaggtgaacgggaaggagctctccaagctgtctcaggagcaaactctgc

SEQ ID NO: 884608 - DNA, 99 bp, Homo sapiens
ccgaccagggacctgcccgcctgcggctgctccggcgcttctctgaagtagctttggaaagtagagaagaaaatccagtttgcttcttggagaacactg

SEQ ID NO: 884609 - DNA, 76 bp, Homo sapiens
atgaagacttgaacttaatacagcaagaaagaccatcaagtttaccagctttcccaacgagcctgctgcagtcatt

SEQ ID NO: 884610 - DNA, 76 bp, Homo sapiens
cctgtcttctctcgaaccctggacaaccaggaatacttcgagcggcaccgctggccccctgtgtggtacctgaagg

SEQ ID NO: 884611 - DNA, 99 bp, Homo sapiens
tggaaaagcatgggggtatctgtgactgccagacatcaaggaggcagttcccatgttatacgcagcagatacttacggagcattgtaatgaagtgtggt

SEQ ID NO: 884612 - DNA, 75 bp, Homo sapiens
gctctgcattgaaggcactggggtgaggcttactgcccggcaggctggagtgactccaaatttgcatatactgga

SEQ ID NO: 884613 - DNA, 98 bp, Homo sapiens
agagactgaagaggactcaggagcaaatcagtaattgataatatgcagcatgcatactgggaactgaagagagaaatgtctaatttacatctggtgac

SEQ ID NO: 884614 - DNA, 76 bp, Homo sapiens
gacccaacacaaatggttcccagtttttcatctgcactgccaagactgagtgctggttatattctgggcactaaat

SEQ ID NO: 884615 - DNA, 98 bp, Homo sapiens
agacgttttacaaattcatgaagcgaattgctgcttgtcaggagcagattttgagggtcaatgcaaccaacttcatggaggcaggagccccagttatg

SEQ ID NO: 884616 - DNA, 76 bp, Homo sapiens
ggggcacctgcctgcagcacacccagcccctcatatggaaaatttgaaatgcagaggggaaacagtagcaaaggag

SEQ ID NO: 884617 - DNA, 98 bp, Homo sapiens
acaggcacacaagtgtgaggagttgctaaatgctcagaaggatgccctgcagtggtctcgccatccagctacagtggagggagaggagccagaggaca

SEQ ID NO: 884618 - DNA, 99 bp, Homo sapiens
atttaccctttagctttacaaagctacagcaattgacagctatgtggctctcagataatcagccacctcgtacatctcatcctgtagtgaagttttcct

SEQ ID NO: 884619 - DNA, 76 bp, Homo sapiens
cccaggtgtaagcgcagaaagcaggcgaacccgcggcgcaataacgaaacagatgattatgctgagattatagatg

SEQ ID NO: 884620 - DNA, 99 bp, Homo sapiens
cagtcctagctaaacttcgccaactccgctgcctttgccgccaccatgcccaaaacggccctcagcatcctcatgctccctcacaacatcccgtccagc

SEQ ID NO: 884621 - DNA, 99 bp, Homo sapiens
acagcacagttcctgggaaggtggagccaccagcctctccctggcatcagcaatgcagaagcacggcagccagggaaggcccccaacttcagtgtcaac

SEQ ID NO: 884622 - DNA, 98 bp, Homo sapiens
gaatatggaggccatttcacctctaaaaaatgggatggagttgaagtattgataacaccaaggaactctatcacaatttgaaaagataagcaaaagtt

SEQ ID NO: 884623 - DNA, 99 bp, Homo sapiens
gaataaacatgcaatgaacccaaaagggtgtcagttgtacccgaggcgttctcagcagcagcaagtacctgtggtggatttccaggctgaactgaggca

SEQ ID NO: 884624 - DNA, 100 bp, Homo sapiens
cccgccgccgctggagctagaggttcacgcaaagaatctgctccacaagttttgcttccagaagaagagaaaattatagtggaagaaactaaaagtaatg

SEQ ID NO: 884625 - DNA, 99 bp, Homo sapiens
gtacctgaaccggcacctgcacacctggatccaggataacggaggctggggccgttgctccagggagaactgcaaatatcttcatccacccccacattt

SEQ ID NO: 884626 - DNA, 100 bp, Homo sapiens
gctccatcaagcttggcagcttcagggatctgtaaaaaagagcgggtcacagaaagtcgagagagccaaatgacgattgaggagaggaagcagctcatca

SEQ ID NO: 884627 - DNA, 99 bp, Homo sapiens
ggcaacagctccgagtgtgggcagcagccggtcgtggagaaatgcgaggccaaatttgagtccctctttaggacgtatgacaaggacatcacctttcag

SEQ ID NO: 884628 - DNA, 99 bp, Homo sapiens
agcgccccagggcaagccccgctccggccaacaagctctctatgagaacatgctggtggagctgccctttgcaggcttctttctttccaagttgcttgg

SEQ ID NO: 884629 - DNA, 99 bp, Homo sapiens
cagaacagaaccctgggaggggaattccagcaccgcagcaaccactccagaaactttccctccttcagcaggacccagtgctccataaaggataatagt

SEQ ID NO: 884630 - DNA, 76 bp, Homo sapiens
cagcgcgccaaaaccgggacggacaagaccctggtgaaggaggtcgtacagagaacgccagatcaagtgtcccaag

SEQ ID NO: 884631 - DNA, 98 bp, Homo sapiens
ggccattttctcaaacgagagtcagcctttaacgcacgaggtagaactaacattgaacttagagagaaattcatcctaccagagggagcatcccaggg

SEQ ID NO: 884632 - DNA, 76 bp, Homo sapiens
acaacgtttccagctgggaattatggatgatgctgcagagtgctttgttatcctgaatacatgtctaacaattttc

SEQ ID NO: 884633 - DNA, 100 bp, Homo sapiens
gtccttcactcctactgcatcctccagggtcgtatagacctccccctcctatgggcaaaccaccaggttcaattgtaagaccctctgctccaccagcaag

SEQ ID NO: 884634 - DNA, 100 bp, Homo sapiens
cgttccgcgaggacctcgcgctcggcacccagctggcgggggtccataggctgctgcaggcgccgcacaaggtgctcagcagggagaccccctttcccgc

SEQ ID NO: 884635 - DNA, 98 bp, Homo sapiens
ttgaaagtagatggactgaactactcagtaaggcagcagccaggtgggaatgatggttagatgctgccgaacatacgaagaagtgtgcgaaggtgatg

SEQ ID NO: 884636 - DNA, 98 bp, Homo sapiens
agaagacggatgagtctgggccccactcccaccgcctctactacctggggaagaagcagttgccagatgcccagctcctggcccgccgcttcctgctc

SEQ ID NO: 884637 - DNA, 98 bp, Homo sapiens
cactcttctccttcacagtaaagtggctgtatggaaatttcatcgataagctaagactcttcaccaggggaggatccggtggaatgggttatcctcgt

SEQ ID NO: 884638 - DNA, 99 bp, Homo sapiens
tctgtggttgctgcagccggaagtcgtcttcatcctgggggatatctttgatgaagggaagtggagcacccctgagggtgtgtccgcagccggccaggt

SEQ ID NO: 884639 - DNA, 99 bp, Homo sapiens
ggaatcccaggatggtagcccttgctcaacagaagatttgctctatgatcgtgataaagccatccgcagagccatcctgtgcaaaggaaggagctaggc

SEQ ID NO: 884640 - DNA, 99 bp, Homo sapiens
tgacaccagaagagagcaaggaaaggcttggatgaacagactagccactttgcattgactggaaacaatggcatttacagaaagagtcaacagcagtgg

SEQ ID NO: 884641 - DNA, 76 bp, Homo sapiens
cgaggcagtattgacagggaggatggaagtcttcagggtccggagctcgaagagaaacatcgggaggcccaagtct

SEQ ID NO: 884642 - DNA, 98 bp, Homo sapiens
agtaagaagggagcacggaacagattcaagctcaggaatggcggcgctagatagtaaggcatcagggaagatgggaatgcgagctgtagtctattata

SEQ ID NO: 884643 - DNA, 99 bp, Homo sapiens
tcaagttgctactcgggacgctgcacctcccgcgccgcacggtggacgagtgatcagggccaaagcggtcagtgagaaggaagtggactctggaaacga

SEQ ID NO: 884644 - DNA, 99 bp, Homo sapiens
accttatgcgggccaatatcacagccatccgcagagtccggaagacagacaataatcgcattgctaggcccttgagggaaagctacttgatcaaacatc

SEQ ID NO: 884645 - DNA, 99 bp, Homo sapiens
ctaccgggcccagcacagccagcaccgcacgccctgcaagggaggagttaaagttcctcgtaattttcgcttgttggaagaacttgaagaaggacaaaa

SEQ ID NO: 884646 - DNA, 99 bp, Homo sapiens
acccccaccatccctaaccggctggctgcagacccggttcgagattgaaattgagcccatctttgggatcttggctctgtatgatgtgcgggagaaaaa

SEQ ID NO: 884647 - DNA, 99 bp, Homo sapiens
cagcctcaggcgtgcgcggacggtgtgcggggaagatcagttttcctgccatccaggctgctccctccttcagcaactcattcccacagatcttccgag

SEQ ID NO: 884648 - DNA, 98 bp, Homo sapiens
gcgagtgcgcctcctgcccgcggaccgcggcagcccagagcagggcatccgcttcgatcctgaaattccgcaaacactacgactagagtttgctaagg

SEQ ID NO: 884649 - DNA, 98 bp, Homo sapiens
aaaaattaaagaagatgatgctccaagaacaatagcttgccctcataaagcgagtttataccgaggtggctacagccgatttgccccctactgaagtg

SEQ ID NO: 884650 - DNA, 99 bp, Homo sapiens
ctgaagctgcaggaggaccggcgacagcaagagggctgctgaagtatcaaactaatttagatacccaccctcccggctgcatcagtcttaaccgaacca

SEQ ID NO: 884651 - DNA, 99 bp, Homo sapiens
cctgacaaaaaatcatgcaattttctctgaagaccttgaaaatctgaagaccaggtgtctgacttccagcaactgctggcctgtgccagggtgcaagct

SEQ ID NO: 884652 - DNA, 98 bp, Homo sapiens
agaaattgcacgtcagctgacacttttggagtctgatctttacagatgttgatgttagtgaagattcacctcctcccctacctgaaagaactcctgaa

SEQ ID NO: 884653 - DNA, 75 bp, Homo sapiens
aacacttaacagcttcaggctttcctgatcaatgtaaccactgtgcgggaatatctgccagaaggagacttttca

SEQ ID NO: 884654 - DNA, 99 bp, Homo sapiens
ccgaggactcggagttcacctgcagagctccagagattatattggggttgccattttgtgaagccatagacatgtggtcattgggatgtgtgattgcag

SEQ ID NO: 884655 - DNA, 99 bp, Homo sapiens
gagaaggaaagcaccatgacgtccatccatttcgtggttcacccgctgccgggcaccgaggaccagctcaatgacagttcctgcctcacgctggggacc

SEQ ID NO: 884656 - DNA, 76 bp, Homo sapiens
atggagacattctgatggaatttgggatcaagaattggttaaaatagttggaatacgatatgaagttgggccccct

SEQ ID NO: 884657 - DNA, 75 bp, Homo sapiens
ctcgagagcggcctgattgggaagaaactcttagcgcaatggagttggtaatgcttctcttagaatataatgctg

SEQ ID NO: 884658 - DNA, 74 bp, Homo sapiens
atttgatttcagaggaatgagattagattggtttaggttacaggagtccaatgtgctgattgctgctaacagtc

SEQ ID NO: 884659 - DNA, 76 bp, Homo sapiens
caacaccgtggccctgttctgggatgagcaaggtgtaaagaaatgcactcggtgatggaaagagagccactattct

SEQ ID NO: 884660 - DNA, 99 bp, Homo sapiens
caccatctccatcacccaccaacaacaccacaataatccacagccaagaggaagctcaccagtgtgggaaggggcttctcatccactgccaggctgggg

SEQ ID NO: 884661 - DNA, 99 bp, Homo sapiens
ctgaacttcagttgccttacctgtaagaggtgctgatactcaaagaaggtttaagttgtctgatctctctataaattccactgaatgtctacatgtgca

SEQ ID NO: 884662 - DNA, 98 bp, Homo sapiens
gagcgtcctgagactaaggaaagagcctggaaaatggagcagacctggacgagaatttcacaaacttgtttggacagccactagtctgcttgctttct

SEQ ID NO: 884663 - DNA, 98 bp, Homo sapiens
cgggaggggcgaaggcgggcggcagaggcgatcagatcaggaatgttggagtctggtattgaccgaattatttctcaggttgtggacccaaagatcaa

SEQ ID NO: 884664 - DNA, 98 bp, Homo sapiens
agggcttcacgaccaaaggtgtcacctcagtctctcagatcttccacagcccagataaagtggagaattttcatgaagaacatgaaaagaatagtcac

SEQ ID NO: 884665 - DNA, 98 bp, Homo sapiens
aactaaggatcccgttgaaagtcctgcggcagtccagctcctacgaggcgtgccttttccccacgactctgaaagaggacagcgttcccaatgtccca

SEQ ID NO: 884666 - DNA, 98 bp, Homo sapiens
cggcgagcatcacgccgaggcccattttccagacgaccacgacgaggccggggtcacgtgtccctggccagtgtccttccacctgtccacaagcatgg

SEQ ID NO: 884667 - DNA, 99 bp, Homo sapiens
ctgaagctgactgcatcaacaacatcaatgacttcctgaaaggatgtgcaaccctccaagtggaagcagaagctcctcctggggtagagacagatctta

SEQ ID NO: 884668 - DNA, 99 bp, Homo sapiens
gaggattcagggaataggagctggggagcccttctgcgccacaggatgaccagtgtcccagtgaaggaacgagtgaaggtgtctcagaactggagactg

SEQ ID NO: 884669 - DNA, 99 bp, Homo sapiens
ctgttcgcagcgtggattttaaccgaggcacggacaacatcaccgtgaggcagggggacacagccatcctcaggtatacccgaaatcttgtggatcaag

SEQ ID NO: 884670 - DNA, 99 bp, Homo sapiens
agggtcttctaagtcagagacatcaaaacctggaccttctggattacaggccaaattagcaaataatgttaattcaagactctcgaagagaagcttcag

SEQ ID NO: 884671 - DNA, 99 bp, Homo sapiens
ggacttccaatatgagaatgccaacatgtggttcaagaaccttgacaagctcatccggctggtaaatgcgcaggtgaatgtgcctcttaggagcacttg

SEQ ID NO: 884672 - DNA, 76 bp, Homo sapiens
ccctatcctatccgcaaacatatgatgaacatttgactcaacttgagaaggatatttgtactgctaaagaagcagc

SEQ ID NO: 884673 - DNA, 75 bp, Homo sapiens
caaataccagcctaaaggggggcagtgcactgtgaggtcagtgaatggaatccttggagtccatgcacgaagaag

SEQ ID NO: 884674 - DNA, 98 bp, Homo sapiens
tcaagttcattgatcgtaagagctctctcctcacagatgccggtggtggtgtgcacattgagccccggtatagacagttcccccagctgaccagatcc

SEQ ID NO: 884675 - DNA, 76 bp, Homo sapiens
ctctggttcagctcatacaacagcttcttaggcttgggcctggaacaggacaggcaggggcccgaagaaagtgatg

SEQ ID NO: 884676 - DNA, 99 bp, Homo sapiens
tcatctataacctccttgaaaaactgggatacatggatctggcctcaagactggtggtcacttttacaaagagaaagtttggattaatgaagaaagcct

SEQ ID NO: 884677 - DNA, 98 bp, Homo sapiens
gaacatgtctgagtcggagctcggcaggaagtgggaccggtgtctggcggatgcggtcgtgaagatagggcgcaacctatatcctggtgatggtggat

SEQ ID NO: 884678 - DNA, 73 bp, Homo sapiens
ctcttggaatgtgctaaggaacttgatgtccaaataattggggttaatttggatttaggtggcgagtagaaaa

SEQ ID NO: 884679 - DNA, 98 bp, Homo sapiens
agaccagacctgcaagctctttgacacacagcagttcttgtcaggtgctggagaatctggtaaaagcaccattgtgaagcagatgaggatcctgcatg

SEQ ID NO: 884680 - DNA, 98 bp, Homo sapiens
tggacagccggaaaatccttgcccacctcagagcttccatctgccaggttttgcacactagggaccaagaagccctcggggacactgctgagaaaaga

SEQ ID NO: 884681 - DNA, 75 bp, Homo sapiens
cctcatctcgtcagtgactttctttactccactggcaattttgactggagcacccgttggacttggaaatcctag

SEQ ID NO: 884682 - DNA, 99 bp, Homo sapiens
ccccactgagtgaggctggggacctcactgagaagtattttgctctgcgaaacatcatccagaaggttgcagtgagagcagatgctggcaagaagcact

SEQ ID NO: 884683 - DNA, 100 bp, Homo sapiens
gcgagcatgcccgggagcggaaggtgcctgtgacgaggattggccggctggccaacttcggagatgacctgagaattaatttatggcacttagaaatcac

SEQ ID NO: 884684 - DNA, 99 bp, Homo sapiens
gaggatgagcctgcagagcgcgcagtacctccgcttttcgctgtggcctgcagtttttaggcaacattgcctcacggaatgaagattcccagtctattg

SEQ ID NO: 884685 - DNA, 99 bp, Homo sapiens
ggatcccgagccgggcaggatggatcaccaccagccggggactgggcgctaccaggtgggtgcagcccggaatcccgaggatgtggaccgggagcggcg

SEQ ID NO: 884686 - DNA, 98 bp, Homo sapiens
acggcccggatgagtacgataccgaagcgggctgtgtgccccttctccacccagaggctgctctttggcgtaaattgcaatcgattagggatcgtttc

SEQ ID NO: 884687 - DNA, 98 bp, Homo sapiens
ggcgattcgtgttcgtgagggccttttctggtgaaaggtgtagcagtcactcggcctacacccacagcatcgaccttgtgaacccagcgacctgactg

SEQ ID NO: 884688 - DNA, 98 bp, Homo sapiens
gtgcgatacgtgcgccatctgcagggtccaggtgatgggatgctgacagacagcaccaagaagtaattgcaatttatcggacacaccttcttagtgct

SEQ ID NO: 884689 - DNA, 98 bp, Homo sapiens
cttggcagccttcctgatttctgcagctctgtgtgaaggttgggtatctacagccattggttgctgttcaggtcagctttgctcctaacaacactggg

SEQ ID NO: 884690 - DNA, 100 bp, Homo sapiens
ctgccctgtggcctcgctcctcggaggggttctgagcaaggttcaaccagtcaagaacaggccttatctgctcagcaagctgctgttattaaccttactg

SEQ ID NO: 884691 - DNA, 99 bp, Homo sapiens
gtgattctgaagagggtctggaggagccttctcaagaacagagatgcctgtgaggagccaccaacatttgaagctatggagctcattggtaaaccaaaa

SEQ ID NO: 884692 - DNA, 99 bp, Homo sapiens
acagaagcagtacaaaaatggcctcaagttttgcaagatgattctgtcgaacccaaaatttgctgaacatggagatacattccaccgttgatctggggg

SEQ ID NO: 884693 - DNA, 98 bp, Homo sapiens
gcgcgtggaacggctgcttttggaaggagctatgaagacatgattggtgaggaggtgccatcggatcaatactactgggctcctttggcccagcatga

SEQ ID NO: 884694 - DNA, 98 bp, Homo sapiens
tccgactgggtcaggttgcggagactccaggccgcttccagggcggcttcagtttcacattcttggtacctcctggtggtgcctgggagggagccact

SEQ ID NO: 884695 - DNA, 98 bp, Homo sapiens
agtaatgaaaagagacatgaagaattggtatttcaaatgaccaccatgttgcaaaagccctaccacttatgtcttggatgaagatgaacctcgattcc

SEQ ID NO: 884696 - DNA, 100 bp, Homo sapiens
ccgtcatcggtttccagacagctgcaccagccacaacgggaccactgccttcagctcctcgggatgtcgtggcctccctggtctctacccgcttcatcaa

SEQ ID NO: 884697 - DNA, 99 bp, Homo sapiens
agaaaagaaactttgctacctgggaactgaagactacttagctcttgaggctagtgcgcctctaggcaagatgtccctgcccatcgggatataccgccg

SEQ ID NO: 884698 - DNA, 76 bp, Homo sapiens
catcgtggattccaagacatccctgctgagagagccaagaggaaggcgaatacttcctgaaggtgctgatccccag

SEQ ID NO: 884699 - DNA, 99 bp, Homo sapiens
taaatgaagcaaagaaaaattgtataattgttccaaatggagataatgtatttgctgcagtcaagacttcctcgttctgcccatcttcctaacaaggct

SEQ ID NO: 884700 - DNA, 76 bp, Homo sapiens
gattcttgaagttgaagaaaagggatccatatggctttggagacagtcgagattcaaggcgtgatcgatccccaat

SEQ ID NO: 884701 - DNA, 76 bp, Homo sapiens
gcacgaaaaatgctaacaacagcttcacgagtgggaggctaagcaaagaactggatttagtaagtcaccatgtgag

SEQ ID NO: 884702 - DNA, 98 bp, Homo sapiens
agcctgagcgacgtgccccaggcggagatctcgggggactcgtgggggatgttagcgtgcctgtgcacggtgctctggcacctccctgcagtgccagc

SEQ ID NO: 884703 - DNA, 99 bp, Homo sapiens
gggaggggcgaaggcgggcggcagaggcgatcagacttaattcagtgcacaaatgagatgaatgtgaacatcccacagttggcagacagtttatttgaa

SEQ ID NO: 884704 - DNA, 98 bp, Homo sapiens
tgttagaaacagtagtggagaatcaagatcaccacgcttattaatcataaagataataccaaaaagtctgataaaactctgcaagcaattcagcgtgt

SEQ ID NO: 884705 - DNA, 99 bp, Homo sapiens
aggagaagaaactgaggcctggaatttgattaactcattcaaggttacccagttggtacaccaggggttggaaaaaccacactaggcaaagaacttgcg

SEQ ID NO: 884706 - DNA, 99 bp, Homo sapiens
gtcatggattgggaagaaagaagcaagaatggtgttgtaaaagatcagccttcagatctaaagcgggaagccagtatctgtcatatgctgaaacatcca

SEQ ID NO: 884707 - DNA, 99 bp, Homo sapiens
ctcaagcagtcctaccatgtcagccttcccagtagctgggaccacaggagctatgaagacatgattggtgaggaggtgccatcggatcaatactactgg

SEQ ID NO: 884708 - DNA, 74 bp, Homo sapiens
cctggatttagtgaaatgccgtatgcaggaatcagagatcattgatttcttcctgggggcctctctcaaggatg

SEQ ID NO: 884709 - DNA, 98 bp, Homo sapiens
gtaagctggctgactgctggtgaagaaaatgctttatttttgtggcaggcatctgtgggatctgtaatagaaatggtaatactgaacaacctgtccaa

SEQ ID NO: 884710 - DNA, 98 bp, Homo sapiens
gggctcccaggacctccactaatcaccagaacaaaatgtgcagcttgcctgggaccagtggcagggaccccggaacctgaaggtgctgacaaagatga

SEQ ID NO: 884711 - DNA, 76 bp, Homo sapiens
ccgcaagaacaagtaccgccccgacctgcgcatgaggctgtggccaggccagctgggctcggggagcgccagcctg

SEQ ID NO: 884712 - DNA, 98 bp, Homo sapiens
acagctttaaccatagcagcagataaagggcattacaaattctgtgagcttcttattggcagcaatgtaacacacacccgtttgacaatgaggtaaaa

SEQ ID NO: 884713 - DNA, 99 bp, Homo sapiens
gcagtaccgtttcctcagcggcggatgaacgactttcgaagtaaaatgcaatcaatatttccaacaattcccaagaactccgaatcggctgttgagtgg

SEQ ID NO: 884714 - DNA, 100 bp, Homo sapiens
agtaggaacattatctgcaaattctagcaatgtaattcagttgatcattgatgcatacaatatttgtgaagctgggaatcatttcatcaatgtaatgttg

SEQ ID NO: 884715 - DNA, 99 bp, Homo sapiens
gcagcccccgggcacgacctctcggacacggtgcaggcaggctggagcattggatttgctaaaggagcttaagaatattcctatgaccctggaattact

SEQ ID NO: 884716 - DNA, 98 bp, Homo sapiens
tgaacagtgtggcccgccatgttcttctccgcggcgctccgggcccgggcggctggcctcaccgcccactggatatgaggccccaggattcctggcga

SEQ ID NO: 884717 - DNA, 99 bp, Homo sapiens
agaagcaatgctggaatgccaacaatttttgaaggccaatgatgaggccaatcagagtgatacaagtgtctccttgtcagaacccaagagcaaaagcag

SEQ ID NO: 884718 - DNA, 98 bp, Homo sapiens
tcgcctctgtgctcgtgagtgcatggggtataaggatgagttccacccgttcatcgaggccctgctgcctcacgtccgcgccttcgcctacacctggt

SEQ ID NO: 884719 - DNA, 99 bp, Homo sapiens
ttcgggcctagcggagccgggactggaggtgaagtggatcctaaagagaggatagcacgccaacgaaaattattacagaagaaacttggccttaatatg

SEQ ID NO: 884720 - DNA, 75 bp, Homo sapiens
cgggattacagtgcggacggccagcttcttcactacagatgcctgaggaaacccagacccaagaccaaccgatgg

SEQ ID NO: 884721 - DNA, 99 bp, Homo sapiens
agctgcagaaccaacgaggtggccgaatcttccttcaggatatcaaggtacactgaggaggggacggctccgtcttcacattgtgcacagatctgagga

SEQ ID NO: 884722 - DNA, 98 bp, Homo sapiens
cttagctcagcaattcttaccttttttatgtgctgaaagagttggccagatgactaagacatataatgacatagatgctgtcactcggcttcttgagg

SEQ ID NO: 884723 - DNA, 99 bp, Homo sapiens
cagccatcacccctggccgcgggcgtctccagcctagggtgaatgtttccccctccaagaaggggcccttgcagcaccacaacctgcttgtctgccacg

SEQ ID NO: 884724 - DNA, 99 bp, Homo sapiens
gcaaatgcagaggaagaatttttctatgaggctcagcttgtcaatcggaaacagaaattagagtctgtggaactttctagccaatcagaaattcaacac

SEQ ID NO: 884725 - DNA, 99 bp, Homo sapiens
gaacttgggttgatatctgcaataatcctgctatggaagctgaaatactgaaagaaattcgagaagctgcaaatgccattttggaaagacatcgttgat

SEQ ID NO: 884726 - DNA, 99 bp, Homo sapiens
gtccctcaccgcggcatcaagcaggtccggacccactggctgctggagcttgtcaccaccagcaggatacagacgtccctcaccagtgccagcttgggg

SEQ ID NO: 884727 - DNA, 75 bp, Homo sapiens
gtttctcagacacattcatttttacaccccaggtgttggagcgggccggagagaagtagagtgggctgcgaggag

SEQ ID NO: 884728 - DNA, 76 bp, Homo sapiens
gatgctggtccgatggttgtgcactgcagtctgatgccaatgcaagttacttaagagcagctcgagctggacacct

SEQ ID NO: 884729 - DNA, 76 bp, Homo sapiens
cccccgtccgctaccggacgttcctgcgggaccaagcgaggagagctacatggtccaggactacgcccagatgaac

SEQ ID NO: 884730 - DNA, 76 bp, Homo sapiens
cggagaacgcggccgagagcaccgagactagacgcttgaagcaaagctgccatcccagaagacgacatgctctcag

SEQ ID NO: 884731 - DNA, 75 bp, Homo sapiens
ggacacgctaaaaggagatcgtgcagcagagagagatcatcattgcctgaatttagctttgtgactgcaagagca

SEQ ID NO: 884732 - DNA, 99 bp, Homo sapiens
cccaaggctgaagatttaagaactgaatgtgcaacttgcaagggaactggagacaatgaaaatcttgtcaggtgcagcttcaagcttaggaccacccac

SEQ ID NO: 884733 - DNA, 98 bp, Homo sapiens
aaaaaccgtgaatcaacagtgccaaaatacagtagtcttgtgggagaataccaaagccttggtcaccgaatgtggccacagatgtctttaattccaaa

SEQ ID NO: 884734 - DNA, 100 bp, Homo sapiens
gaaaaactggagagcttcatcaaaaatagtgatagctttgataaatattgatgatgttaagaagttcaaaccgggttacctggaagctactcttaattgg

SEQ ID NO: 884735 - DNA, 99 bp, Homo sapiens
taaccgggacccggtgtctgctcctgtcgccttcgcctcctaatccctagccactatggttaaacccatccagagtaatggctgcggccttacccagga

SEQ ID NO: 884736 - DNA, 76 bp, Homo sapiens
ggaggaggtggagttctgtgtggaagggttcatcaccagcagccagtcggcagcttatgctatcagcaagtttgtc

SEQ ID NO: 884737 - DNA, 99 bp, Homo sapiens
tgggtgtaatacatcatgaactgcaggggtgtccggtggagagctgtttgaccggatagtggagaaggggttttatacagagaaggatgccagcactct

SEQ ID NO: 884738 - DNA, 99 bp, Homo sapiens
gaaaatcaacgacaacttgagcacaggtgtccgcaaatatggtaaagattttcaagctattgcagatgtaattggcaacaagactgttggccaagtgaa

SEQ ID NO: 884739 - DNA, 100 bp, Homo sapiens
ccttggacgggactatgtgtgcacctggcaagaattatatccagatcgagagacagaagattctgaaagggttcaatgaaatgagagtcatcttggacaa

SEQ ID NO: 884740 - DNA, 98 bp, Homo sapiens
cgacactggttcccatgaagcggctaccaaagctgttctccaggagtttggtagaatcttgtggagaattttgatgaggcttccaagaatgaggcaaa

SEQ ID NO: 884741 - DNA, 99 bp, Homo sapiens
aggcagggtgttagccaagcggattgagccaggacacaacaccgcggagccctgcaggcgctggagagacagccactctgcgctgcactgcgacctctc

SEQ ID NO: 884742 - DNA, 99 bp, Homo sapiens
gctagagctcttcagggaccacactgcaattctggatttcctgccagttttttgctccactcaagcctgttagaatcaccatggaatacagctccagtg

SEQ ID NO: 884743 - DNA, 75 bp, Homo sapiens
cgagtccatcctacgcagggccggctgtgtgccaaaactggacaagccaaggcatctgtagccaaagtaaacaaa

SEQ ID NO: 884744 - DNA, 98 bp, Homo sapiens
cggaaagagttttctccatttggtacaatcactagtgcaaaggtacattttatattggaggaaaaggttcactgaacagcccatcacagatttttgta

SEQ ID NO: 884745 - DNA, 100 bp, Homo sapiens
gttgtaccttgtgacagaatatgccaaaaatggagaaatttttggtgtgatgaatgcagactctgctaccattttggctgtttggatcctcctttgaaaa

SEQ ID NO: 884746 - DNA, 99 bp, Homo sapiens
gcaagcgtttcagcgcctacaattacagctcctggctaaatacaaaagcttgcaatgggacaaagtactgaggctggaggaggtgcaggctaaactagg

SEQ ID NO: 884747 - DNA, 99 bp, Homo sapiens
ccctaggtggaaactaattctaagccagactgctggagatcaccctgttctagtgtgtggaggcttccaccaggaggcctcatgcattgtgcgtcagca

SEQ ID NO: 884748 - DNA, 76 bp, Homo sapiens
aacagctaacagcaacacagaaatttagaaagctgctttctaaaggccttgcagtattaaaacatgtgctaacacc

SEQ ID NO: 884749 - DNA, 98 bp, Homo sapiens
ttgaaggaggccagaaagttgttttcaaacctaagcgctacaagagactgtgaaaaggaagttggaaggagctcgatcaccacttaatggagaccagc

SEQ ID NO: 884750 - DNA, 76 bp, Homo sapiens
gttgcggccagtcgccactgctgtttccactgtatccaaaaggaggggagaagttgcagtttgattatggtgtcta

SEQ ID NO: 884751 - DNA, 98 bp, Homo sapiens
cgcctctgagcgggacgccgggactcccgccgctgctaaatatatccgtaggaatggagagggaccggatctcagacggaaatggagagctggatttc

SEQ ID NO: 884752 - DNA, 99 bp, Homo sapiens
agatcatgtgtgaaatcctaagtggattgcagttgggagactttctcattaagggtgaacctggtcctcttggcattgccggccctcctggggcccgtg

SEQ ID NO: 884753 - DNA, 75 bp, Homo sapiens
caaaggtggaactccagggaaggcatgaacttcttgaagaagctcggagaaagggattaccttttgcccagtggg

SEQ ID NO: 884754 - DNA, 99 bp, Homo sapiens
gagcatcatttgcaggaaggatgcaccccactccgagggcgacatgcacgatactgaggaagatgaggaggaagatgagaaggacaaaggaaaactgaa

SEQ ID NO: 884755 - DNA, 75 bp, Homo sapiens
gatacctgttcatgtgttttggaggcaccgtctctccctgggaccagttgcatccttaatgtccagtcaaggagt

SEQ ID NO: 884756 - DNA, 99 bp, Homo sapiens
ctgcagtgagccctgtttttgccaccacactccagcttggacctaatctgggagcctgcaagtgacaacagcctttgcggtccttagacagcttggcct

SEQ ID NO: 884757 - DNA, 98 bp, Homo sapiens
gtcatttcctgccggccggtcggtttccggatgaaacgaggagccaggacccagatgatgtggtaccagttggccaaagaagagcctggtgttggtgc

SEQ ID NO: 884758 - DNA, 76 bp, Homo sapiens
ccagactggtccatccccatcttggactttgtggaacagaaatgtgaagattattgctcagttgtaactattgtgg

SEQ ID NO: 884759 - DNA, 98 bp, Homo sapiens
ggcacgcgcgcaggagctcatgtggcctgcggctcctgtcgcctgtatgttgatgggaaccattttcagcatcctgctggtgactgtcatccttatgg

SEQ ID NO: 884760 - DNA, 99 bp, Homo sapiens
aaaacaccagcgtgccaaaagagcagtctcacatgaagaccaatttttacgtctagatttccatgcccatggaagtggtttatcagatactatcatttt

SEQ ID NO: 884761 - DNA, 98 bp, Homo sapiens
aggaacctcgccatccagaagtgctgttggcagcagcggtctgcacaaaagcaggaaaggctattgtttctcgacagtttgtggaaatgacccgaact

SEQ ID NO: 884762 - DNA, 99 bp, Homo sapiens
gggcgaagaggacgagggggccaaggcttcctccgggatcccatgcgaggcccaagaaaactagaagtagtggaggtcaaatctcggcaaatcactatc

SEQ ID NO: 884763 - DNA, 100 bp, Homo sapiens
ccaagaaaccactaatttgctaaaaaatctccgagaagcaagggataatgctgtggctgaaaaggaacgagcagtgatggctgaaaaggatgctttagaa

SEQ ID NO: 884764 - DNA, 74 bp, Homo sapiens
gccaaacccaagttggttggagatgtggattttgaaggtttgcctgaatccatcattgcagctgcatgttcaag

SEQ ID NO: 884765 - DNA, 75 bp, Homo sapiens
catcgtggactgtggctttgagcatccttctgagggagccacaaaccactgtggtacacaacgctacagatggga

SEQ ID NO: 884766 - DNA, 99 bp, Homo sapiens
tgctatctgtgcacaagtcattcctttcctgtcccaagagtggatctcttagagttgagtacaacaaatgaaattttcaaacagcacaagttgaaccaa

SEQ ID NO: 884767 - DNA, 99 bp, Homo sapiens
taacctactttaggaagaaaataagcatcacctggcatcagaaatggcaagttccaatcctgtgtatatggagatggaaaaaggagatctaccaacaag

SEQ ID NO: 884768 - DNA, 98 bp, Homo sapiens
ctctaggtgtaaggaaggtgatgtcgtaaagccgggagtgtcgtaaaccagctcaaactggaggattataaggatcgcctgaaaagtggagagcatct

SEQ ID NO: 884769 - DNA, 99 bp, Homo sapiens
agaagggaggctccaagacctcatcaacaattaaggttattgataaggaaactatagatttattggcgttcacctctgttgcagaactggagttgctgg

SEQ ID NO: 884770 - DNA, 99 bp, Homo sapiens
cagactatgagtctagtttaaaggtatgccattgcattggccttaagggaaaagcagcgtgtaatatttaccagcccaattaaggctctgagtaaccaa

SEQ ID NO: 884771 - DNA, 98 bp, Homo sapiens
aggattccaagtaactcttatttggtgacagattgactgggatcccctcgcacatcctcaacagctccccatcagaccggcagattaaccagctggcc

SEQ ID NO: 884772 - DNA, 100 bp, Homo sapiens
aaagaccatgcagggcagtgaggcctctgagcccaagtctgcacgtattcatccagatggcctgaagtaactgaagattcacaaaagaagtgaaaatggc

SEQ ID NO: 884773 - DNA, 76 bp, Homo sapiens
cttcaggagagcgccccagggcaagccccgctccggccaacaaggtgataaaagaaaatgtggctgaagttacccg

SEQ ID NO: 884774 - DNA, 99 bp, Homo sapiens
aacagcatcttggaagtccttagctaccaggatgcgattgatatagaaatcaacggcagtgcagtggatcttcacatgaagttgggtgataacggagaa

SEQ ID NO: 884775 - DNA, 99 bp, Homo sapiens
tatcctactaatagtgactttgagttgaagacagctgagctcccacccttaaaaaatggaggatactcactgttaccattctggctctctgtcttccaa

SEQ ID NO: 884776 - DNA, 99 bp, Homo sapiens
cggattccttgcttggcggcagggggcggaacaaggagccttggagcggggcaaagaggaatacccacacaccgaagttgggtgaggaagattcgtttt

SEQ ID NO: 884777 - DNA, 99 bp, Homo sapiens
tgaggagccagaggagaccagaggcttgggttttgatgaaatccggcaacagcagcagaaaattatccaaggggcctccaggacccggaggagaggcag

SEQ ID NO: 884778 - DNA, 99 bp, Homo sapiens
tgcccatatctgcaaaatgacagatgtctttgaaggccatggcgagtgtcactgcggggaatgcaagtgccatgcaggttacatcggggacaactgtaa

SEQ ID NO: 884779 - DNA, 100 bp, Homo sapiens
acactctgaagattattgagcggctggaccacctggagaatgtcatcaagcagcacattcaaggtagcagttttacaacatcatcaggaatatatacagg

SEQ ID NO: 884780 - DNA, 99 bp, Homo sapiens
tcgcctctgtgctcgtgagtgcatggggtataagttcaggacctcaaggggctcggctatgagaaggggaagcctgtgggtctagtgggcgtcacagag

SEQ ID NO: 884781 - DNA, 99 bp, Homo sapiens
gtgatagacgatagagaaggaggatcaaaatcagacagtgaagatataacaagatcagcaaatctaactgaccaggtactccaaagattcaggtttact

SEQ ID NO: 884782 - DNA, 75 bp, Homo sapiens
cttttccacagggaattgagttgttgcaggagaaataacaaggcattgaagaatggcagatgaacggaaagatga

SEQ ID NO: 884783 - DNA, 76 bp, Homo sapiens
acagctaagacgccaggacccactggaagcctagaaatggtgaacagtggtatagcagccactccagcctctgctg

SEQ ID NO: 884784 - DNA, 99 bp, Homo sapiens
ttcgagaaatctcgtctcgaccaagagctgaagctgatcggtggggtggaagacaacccgtgagtattacaccttcatgtgggttactttgcccattga

SEQ ID NO: 884785 - DNA, 99 bp, Homo sapiens
ccatccccatttctatggtcctcctcacctatggccgctggcagagctttatggatatcgcaatttcggataagggattatggacctgtacttccctta

SEQ ID NO: 884786 - DNA, 76 bp, Homo sapiens
gttgaaaaactcctagaagccataagtgaaactagcagtcagcagtgtttgcaaaaaattttcatgtcaaagcagt

SEQ ID NO: 884787 - DNA, 98 bp, Homo sapiens
gacattcacttacgccaccgccatcactttcatcacatggatcctcatccagtttgcatttagtcatttacccttcgtggtgaccacagatccccagc

SEQ ID NO: 884788 - DNA, 100 bp, Homo sapiens
ccagggagaaaacaaaggcggccggcctggtgcgcaaggccccgaacaacaggtatttagagaattacctggccaacctctttgcaggagcctgggagcc

SEQ ID NO: 884789 - DNA, 76 bp, Homo sapiens
gaagtgagtggccgaccgcagcagctcaaggtgccatctgcctggtggccaaacaggagaagaagaagaagaagac

SEQ ID NO: 884790 - DNA, 99 bp, Homo sapiens
gtgaaggctatctctacagttcagtcctgctcaggttccaatgatgtccccaaatggttctgtgcctcctatctatgtgcctcctggatatgccccaca

SEQ ID NO: 884791 - DNA, 76 bp, Homo sapiens
ggacgccttccagcacggcatctgctttgaggccaaggtgccgtgagcgatgtggagatgcaggaacactatgatg

SEQ ID NO: 884792 - DNA, 99 bp, Homo sapiens
ttcacgtatgtacctgcggttataaattgagatgagtgctgtgaaggagaagtccattctgatgctctgaatatgagggaaggcaccattggagatatg

SEQ ID NO: 884793 - DNA, 99 bp, Homo sapiens
gctcatcctgtccatcgtgtgcctgatgatcacgcagctggctggcttcagtggaccagaggacgacctggctgagctggcctcccagcagtactttgt

SEQ ID NO: 884794 - DNA, 98 bp, Homo sapiens
ccgatcatggcggatggcccccggtgcaagaggcgcaaacaagccaatcccaggaggaaaaacggttctcctcaaaatctaagtctatggacaaatca

SEQ ID NO: 884795 - DNA, 100 bp, Homo sapiens
gacttgaaagaataaaacagaaacagtctcaacttcaagaacttattctacagattatgtttgagaccttcaacaccccggccatgtacgtggccatcca

SEQ ID NO: 884796 - DNA, 98 bp, Homo sapiens
ataaaccagtcacccaagtgcattgcctttggaaacgagtcaccaggagactaaagtccatcaaaaacatccagaaaattaccaagtctatgaaaatg

SEQ ID NO: 884797 - DNA, 99 bp, Homo sapiens
agaaacgtcaatggatcccatcacgggagtcggggtggtggcttctcggaaccgagccccgacaggctatgacgtaggagaagagcctgctgagtgcag

SEQ ID NO: 884798 - DNA, 98 bp, Homo sapiens
ttgcgggtcatggagtcccgaaccctcctcctgctgttctcgggagccgtggccctgatccagacctgggcagatgctggcatatatgttctattctg

SEQ ID NO: 884799 - DNA, 98 bp, Homo sapiens
gggcggtggcttcctttccgccactgcccaaactgctgaagcagctcccgcgaggaccacccggaagacaactgttagttttgtggcttactgctgct

SEQ ID NO: 884800 - DNA, 99 bp, Homo sapiens
atatctgagggagaagcacaagatcatgcacagagaaatatacagcctctgcagacactgcttctgaatgaacgggctggagtttccttgggatcctga

SEQ ID NO: 884801 - DNA, 98 bp, Homo sapiens
ggagatgactgctgagctccgagaggtgaacagagcccctgggagactcatgcatctgtatgccgtgtgcgtggactgcctggaaggggttcacaaga

SEQ ID NO: 884802 - DNA, 75 bp, Homo sapiens
caagcagaatgtgatttgcttgaagatatgaggtaactaggatttctacctcaaccgcgagacctatgcaaggac

SEQ ID NO: 884803 - DNA, 73 bp, Homo sapiens
tgtgaggaggatcaaaatgttggagtatgctcttaaacaggaaagggtctctcatccaatgacctcaactgct

SEQ ID NO: 884804 - DNA, 76 bp, Homo sapiens
cccagggcctcattccacccgtggaggactttcctgtctacagtgcgtcccagacctggagaatacctgccctctc

SEQ ID NO: 884805 - DNA, 76 bp, Homo sapiens
ctagatcaaaatgaagatgcatttgaagcccagtttcaaagtgcaaacggcctcctcattgagtatgaagacatgt

SEQ ID NO: 884806 - DNA, 98 bp, Homo sapiens
gcagaaaatagcacacttttactctacgcaactgttgctttttcatggaagaggagcaggacttggatggtgagaaggggccatcatcggaagggcct

SEQ ID NO: 884807 - DNA, 100 bp, Homo sapiens
aaatcacacgcataatggatgaaaggaaccgacaggtctccaatggtgcagggaccatgtccgtctccctcgtggctgatgagaaccccttcgcccaggg

SEQ ID NO: 884808 - DNA, 99 bp, Homo sapiens
gctcctgcccctgtccgggggatgactgattctcctccgccaggtttggtgcacctcgatttggaggaagtagggcagggcccttatctggaaagaagt

SEQ ID NO: 884809 - DNA, 99 bp, Homo sapiens
gatttcagcctgcacggatggtcttgaaacacaaatggtttttggaggaagaaggcacctacgatcaaactctggagttccgtaggggaggtgatggcc

SEQ ID NO: 884810 - DNA, 99 bp, Homo sapiens
ctgttgctggagaagaaccgctcgctgcagtccgagaacgccgcgctgcgcatctccaacagcgacctgagcggtctgcagcccagagggcaccttctg

SEQ ID NO: 884811 - DNA, 98 bp, Homo sapiens
gcggtcgctctgaaatcgacgagctgatcaaggagaacattaaccaggtggtatttgttggaaatttcttgagaattaatacgatcgccatgcggctt

SEQ ID NO: 884812 - DNA, 98 bp, Homo sapiens
ggaacctgaagttgaatatgagagagtctcgctctcagtcaaaatctccaacgggaactcctgctcgtgtaaaatcggagagcaggtcaggatctcgt

SEQ ID NO: 884813 - DNA, 75 bp, Homo sapiens
cagaagggctacgaagaagtgcttcagcgggccaggaagcgcatccaggagccaaaattgcctggaaaagagcag

SEQ ID NO: 884814 - DNA, 99 bp, Homo sapiens
tactatcctcggtgctgtggtgcagagctagttcctctccagctcagccgcgtagatggcccactgcgtgaccttggttcagctgtccatttcctgtga

SEQ ID NO: 884815 - DNA, 98 bp, Homo sapiens
tttacgtgagctttgcaccgagcgcctccgaaccactgcctctgggctcaacagaacacaggggtctggtccatcgaactcatatgtcatcctgtcgg

SEQ ID NO: 884816 - DNA, 100 bp, Homo sapiens
ttggagaggggcgggacctggagagaggctgccagctgttggtatatccaggagcttttaatctgaccactggaccagcccattgggagttacttcagcg

SEQ ID NO: 884817 - DNA, 99 bp, Homo sapiens
tcctgagtagctgggattacaggtgaaactgaaattggctgtatcatctgaaacttcatctgtgaagtccctggtggtttcctagatgactacacagtt

SEQ ID NO: 884818 - DNA, 99 bp, Homo sapiens
caaggggtaaatgagggtgttgatttctccaaggatctgctgaaagtatgtgactggtgtaagcacataagacacacaaaagaatacctggattttggg

SEQ ID NO: 884819 - DNA, 99 bp, Homo sapiens
ccagaatcagttgttggagaaaattaaagttttcggctttgtgagaaaccttaccatcaaacacgatggccagcaacgttaccaacaagacagatcctc

SEQ ID NO: 884820 - DNA, 100 bp, Homo sapiens
ccctgccaagaagtcgcccatcgcagcagctcgcagtccaaggtgattacgctgtgcctgtaccgagacctcagcggcatgttcaccactgagagccgcc

SEQ ID NO: 884821 - DNA, 99 bp, Homo sapiens
catttctagtggcgtttcttacgaagagtttcaagtaaacctcattgccttctctgaagacggctctgacccctatgtccgcatgtatttattaccaga

SEQ ID NO: 884822 - DNA, 98 bp, Homo sapiens
tcttcccgcgtccgccgattcctcctccttggtcgccgcgtccttggctggcgtcatcaagatggtgctcatgtggaccagtggtgacgccttcaaga

SEQ ID NO: 884823 - DNA, 100 bp, Homo sapiens
aaagtcaccaacgagatcttccgccactacgaggaggttcccctgaaggatgctaaggaatacgctgaatccataggtgccatcgtggttgagacaagtg

SEQ ID NO: 884824 - DNA, 98 bp, Homo sapiens
tgtgctcagggctcgcgggtgaccgaaaggatcatgaactagtgacctggaaagatgccatggacaatattaccaggcagaaccaattctacgatacc

SEQ ID NO: 884825 - DNA, 76 bp, Homo sapiens
ccgccggacgcctccattgtttgaccacaacaagggccggattctcacccagcaacatggctgacaaggccaagcc

SEQ ID NO: 884826 - DNA, 99 bp, Homo sapiens
atccccatggagtttgtgaacaagatgaagaaggaagggaagctgatcatgggcattggtcaccgagtgaagtcggtgggtttggaggatttgggacaa

SEQ ID NO: 884827 - DNA, 99 bp, Homo sapiens
ctcaaacccgacttgtataataaaatgattaacctttcagttcctgataccattgatgaaagagcaatcaacaagaagaaacttacacccttcatcatt

SEQ ID NO: 884828 - DNA, 76 bp, Homo sapiens
tcgactggctgcttggggagattgagtccaagttcaaccaagccattgataaagtagccaatatttggtgcagctt

SEQ ID NO: 884829 - DNA, 99 bp, Homo sapiens
cctggacaaacacatgtctaaagaagagacccaagatctgtgggaacagagcaaagagttcctgagttatccaagcattaggtgaacatcttaaattaa

SEQ ID NO: 884830 - DNA, 99 bp, Homo sapiens
agagattgtgaagaagaatttcgatctccgccctggggtcattgtcagacttcctttaataagtgttgcgctggttcaaggttgggcattgggtggagg

SEQ ID NO: 884831 - DNA, 99 bp, Homo sapiens
cgggatccgccgcacaggctggcactgcttgaagaggaggctactcggagactgcgccgcgcggccagctgaggtgggtgtcctggttggcaaagaccg

SEQ ID NO: 884832 - DNA, 99 bp, Homo sapiens
gggcgggaagatggcggctgggttcaagcatgtggagaccccaaggcaaaaccatcctatcttatcgacaaaaacctggaatctgctgtgaaattcata

SEQ ID NO: 884833 - DNA, 99 bp, Homo sapiens
tcaaaatctgacttatctggaacaacagcttgaagaccatcataggatggagcaagaaaggtttgaggttaccaaagtgacccaggtagatggaaacag

SEQ ID NO: 884834 - DNA, 98 bp, Homo sapiens
cttcctcctcctcccgcgacgaatagctctgtggctattgctgatactgctttagaagacagaaaaaataaattggatactgtacagactctgaaaac

SEQ ID NO: 884835 - DNA, 98 bp, Homo sapiens
aggacggtcggactcccgcggcgggaggagcctgttcccctgaggtctgccatcatggatgttctcgcagaagcaaatggcacctttgccttaaacct

SEQ ID NO: 884836 - DNA, 100 bp, Homo sapiens
gtgcttttgaaccactggaaagtgaggaattttgaagtacaccgtggtgacattgtatcattggtgttcgaattgagcaagtaatagttgctgaacctgg

SEQ ID NO: 884837 - DNA, 76 bp, Homo sapiens
ggagaaagctcacccagttagaagagatgaatccacagtaactataactacccaatattgcagccatggagtccat

SEQ ID NO: 884838 - DNA, 99 bp, Homo sapiens
gaccagcgtgtcccccacatcctcccctgagtccggagctaccaaaaccatcctcctgatcagaggagaggcctgccgggtgagatgggacccaagggc

SEQ ID NO: 884839 - DNA, 98 bp, Homo sapiens
gcgggacctctccgggccatgggggactcattggcgccccctgaggtggactttgacaggctgctggccagcctgcaggatcttagtgagctggtggt

SEQ ID NO: 884840 - DNA, 99 bp, Homo sapiens
ctaaaccatcagctattgaatgaccggtgagatggaagattttcgaggtatagcagaagaatcatttccaagctttctcaccaattcattatttggtaa

SEQ ID NO: 884841 - DNA, 99 bp, Homo sapiens
gcatttttgtttttggaaggagaaggatagacttggctttgaggtgagcatgttagggaaaggatttggtgatgtcggtgaagctaaaggcggcagtac

SEQ ID NO: 884842 - DNA, 99 bp, Homo sapiens
aaccccgaacggggggagattctgctcacggaactgcagtgctacagttgaaactccagcagcgccggacccgggaagaactggtgagccaagggatca

SEQ ID NO: 884843 - DNA, 98 bp, Homo sapiens
ctgaccagagctgatcccgagcagcgtcatgtaccccttacgctacttcctgaagaataaggtcagccctgatttgtgcaatgaggacggactcacag

SEQ ID NO: 884844 - DNA, 76 bp, Homo sapiens
gatttcatcctcaagtttccgcacagtgccccatcatctctacccccagggactcggagatcatgcagcagaagca

SEQ ID NO: 884845 - DNA, 98 bp, Homo sapiens
gcgcaactagcggcgggtcgtgggcacctccagatataattggtgattacaactttcctctataaattaactcttgacactccttgggatttgaagaa

SEQ ID NO: 884846 - DNA, 98 bp, Homo sapiens
ctcaattagccaagataaaatgggtgataagtgtcgctttctacgtattgcaggtcaagtcatcagcccacaaagtagcagtagtggcacggatctga

SEQ ID NO: 884847 - DNA, 99 bp, Homo sapiens
atcgcgttttgccagcgataatacgcctcagggacactccggacgcaggcccggccaggagagttcgtctgcatcgagtgcggaaagagcttccaccag

SEQ ID NO: 884848 - DNA, 99 bp, Homo sapiens
acaagctcagcctggacagcaacagaaatgagccgtcagactgctacagcattacctaccggtacctcgaagtgtccaccatcccagagggtgcctgcc

SEQ ID NO: 884849 - DNA, 98 bp, Homo sapiens
ttggtgctggcattcaggcacctgaagctgcccacggagtggaatgtattggggacagatcagagtttgcatggatgtggtaccacagattgtcccac

SEQ ID NO: 884850 - DNA, 75 bp, Homo sapiens
ctcttctacagagtcctcccagagttcccaagattattggcttcactgtgattgcaaacaagataagcatggcca

SEQ ID NO: 884851 - DNA, 100 bp, Homo sapiens
attggagctcatcagactgaccgtgtcttacatcagttcagagagccctgccaaggtaaccctgctggggtcagttatcttcacattccagcacacccag

SEQ ID NO: 884852 - DNA, 76 bp, Homo sapiens
gcagctcttgtacctgtatgccaggtacaaacagaatggacttcgatgatgaagatggtgaaggccccagtaaatt

SEQ ID NO: 884853 - DNA, 99 bp, Homo sapiens
tgggagagattgttcctgtggagcaaagagctgcatcatgaattcaggagcatcgtacctgtgccgggtggaggagatgcgccagtccctgagaattat

SEQ ID NO: 884854 - DNA, 98 bp, Homo sapiens
ccgcctcggccgaccagggacctgcccgcctgcggctgctccggtgtttgaagaacctgaagatcccagtaacaggtcatttttttccgaaatcatct

SEQ ID NO: 884855 - DNA, 99 bp, Homo sapiens
tcagctcaggaaagcccccaacagagatcaccttcacagttgttgatcacatagcatggtcatccactcacagcttaaaaaaatacagggagcatcgga

SEQ ID NO: 884856 - DNA, 98 bp, Homo sapiens
tgaaactcaccaacaacatttcagacaaacatggatttggtctaaaattcccaggactccacagctttgcaccagataagcctggaggaatactaatg

SEQ ID NO: 884857 - DNA, 99 bp, Homo sapiens
atgttccctgacaatttcgttaaggtttgccatgcagaacttgaattggggacttgttttcaagcagtaaatagcagaattcagttacaaattcttgag

SEQ ID NO: 884858 - DNA, 75 bp, Homo sapiens
caagagtggaaatggagaggtgacatttgtgattcgcctttgccagtctcatctcgtgtctgctttgttaagttc

SEQ ID NO: 884859 - DNA, 99 bp, Homo sapiens
ccaaagtcacaaatcatcctagtaataaagtgaaatcagacccacaacgaatgaatgaacagccacgtcagcttgaaggatgccaatgatgtaccaatc

SEQ ID NO: 884860 - DNA, 99 bp, Homo sapiens
ggacagagatggcgagcgcccggattggggatgagtatgcggaggacagctctgatgaggagggcatgacgtccttgatgaaggccgcgctggacctca

SEQ ID NO: 884861 - DNA, 75 bp, Homo sapiens
agaaaaatcaactgcttttcccagaacacagagagcagagtcaggatggctaaaggtgaccccaagaaaccaaag

SEQ ID NO: 884862 - DNA, 99 bp, Homo sapiens
aaggtccggggcttgccctggtcttgctcggccgatgaagtgcagaggtttttttctggtggtcgttctcgttaccggaccacttcttcagccaacaat

SEQ ID NO: 884863 - DNA, 98 bp, Homo sapiens
agcaagtttaatcagacctgctcacacttcagaatagagaagggaccgagtggggtcaatcttctggtgctgcctctccaggtctcttccaggccggt

SEQ ID NO: 884864 - DNA, 76 bp, Homo sapiens
acggacactcctgagctacagagactgaagaggactcaggagcaaatcagtaatgcaaattgcaacttgatctgtg

SEQ ID NO: 884865 - DNA, 99 bp, Homo sapiens
gggttctagcccacataagagatgatgatgttataatcagaatcaacacagatggggccgaatataacatagaggatcacagtcaccttctatatagca

SEQ ID NO: 884866 - DNA, 99 bp, Homo sapiens
tttgaatcaggtggagaagcacttcaacgctggacgaaacaattgcagcatgactttcccagggccctgattttcagcacggatgattttttcttcagg

SEQ ID NO: 884867 - DNA, 98 bp, Homo sapiens
agcgagctgagtggttgtgtggtcgcgtctcggaaaccggtagcgcttgcagcatggcttcatccctccacccctcatcttcggggctggcatcgact

SEQ ID NO: 884868 - DNA, 100 bp, Homo sapiens
cggcaacatctctatgttgataaaaatacaaagattatttgccagggtttcactggcaaacagcacaacaagccgctctactcctttgaagacaatgcag

SEQ ID NO: 884869 - DNA, 76 bp, Homo sapiens
tctaccaatcctagaactcagtcaatcgagctatatgtgagacagagcctgaacagcctgttcgacattacccatt

SEQ ID NO: 884870 - DNA, 99 bp, Homo sapiens
aagactgatggagcaggcttgcaatattaaagggagccctggaagcttatgttcaatcagtgagaagtagagaaggcaaagaatttgcaccagtttatc

SEQ ID NO: 884871 - DNA, 99 bp, Homo sapiens
caagagctgctgctcctaccagaagcacgaaaaggcctgggtctgctgcgtctgccagcaagcgagggagatgtcctttgcttctcagatgtaaatgca

SEQ ID NO: 884872 - DNA, 74 bp, Homo sapiens
tttctacaaactctgtgcctcaacaaccatttctaagtggcggttttggtgaataacatcaccacaggtgagag

SEQ ID NO: 884873 - DNA, 98 bp, Homo sapiens
ctccagccctcgccgccctcgccaccgctcccggccgccgcgctccggtacacacaggagtacaagcgcaagctagccagagtttccctggtgcgcaa

SEQ ID NO: 884874 - DNA, 76 bp, Homo sapiens
tcggctactacttaataatgacaatctcctcagggaaggggcagcacagtacccactgatggtaatgctggcctgc

SEQ ID NO: 884875 - DNA, 76 bp, Homo sapiens
cgcgaatatcgtcatcgttagaagacattgatgatgccttagagaagaacaaggaaatccaagataaacatttgac

SEQ ID NO: 884876 - DNA, 76 bp, Homo sapiens
aggtccaccattttatgttccacatgctgaaattgaaaggttgtttgttgaggagctcaagcttgggaaaatggtg

SEQ ID NO: 884877 - DNA, 99 bp, Homo sapiens
gtgcttccagctgaggctgtttgaacaggatgctgagaaggttctgcggcatgaggaatttgaagaaggctgcaaagctgcctgtaatgggtatgatac

SEQ ID NO: 884878 - DNA, 99 bp, Homo sapiens
ggacgcaggagcgatggcagcgaccgatatagctcgccaggtggatgataatgaagataattcaaatgatgggacccagccatccaaaaggaggcgaat

SEQ ID NO: 884879 - DNA, 100 bp, Homo sapiens
cctcaacctgttttagcacagatatggtaaacactacacgtgaagagtggtgaaagggaacattgattactgaagtgccctggagagggaaagcactggt

SEQ ID NO: 884880 - DNA, 100 bp, Homo sapiens
ctcttcatcaaggagctgcggagccggacctttcccagcacgagtacagtggcagatgcctaccgctggcgcaaccacaccgtgggcaacaggaccgtgg

SEQ ID NO: 884881 - DNA, 99 bp, Homo sapiens
tccggaatgctgcccgatggccctgggtcctcgctgtggggcaatccgggcttgcagacgaggacccttgaacatctgtgaagaaatgactattctgca

SEQ ID NO: 884882 - DNA, 100 bp, Homo sapiens
ctgaggactaccctgaccctccaataccccacagctattctagtgataggattcacagcttgagctcaaataaggtattctctactgccgctgatggtca

SEQ ID NO: 884883 - DNA, 99 bp, Homo sapiens
gtgcatgaagatgaaggcgatgatacctctaaggtctgcaattaaggccttacgtcctggagggatacttgtatactctacatgcacgctttccaaggc

SEQ ID NO: 884884 - DNA, 99 bp, Homo sapiens
ctggcacaggaggaggggagaaactcccacttcctacacaggaccaaagggagatcacactactggggtagattttctctgtgggcagttctttttgtt

SEQ ID NO: 884885 - DNA, 99 bp, Homo sapiens
aaatgataaaacatttagaacgatgtgaacatcgaatcatggaatcccttgcatggctctcaggacttgccatgaggtgttgaagccttgtttcactga

SEQ ID NO: 884886 - DNA, 100 bp, Homo sapiens
cggggacgacagggaccccgagatcgagctctttgtgaaggtaagaagagttcctgggtcaagtggtcaccttcataaaaccgaagacggggactgggag

SEQ ID NO: 884887 - DNA, 98 bp, Homo sapiens
aatacccgtgtctgaagtcttcaggcgagctcaccacatgctacagagaccacctgggaacgtcccagcagttctcctgggattccagccagccctgg

SEQ ID NO: 884888 - DNA, 99 bp, Homo sapiens
cgcccggaggtgaaatggacggtggatgaaactcagtttaagaagatcctcggctacatcaacacggggaagcaagagggggcgaagctgctgtgtggt

SEQ ID NO: 884889 - DNA, 99 bp, Homo sapiens
ccctgcctatgaccagcaagaggatggggccctggatgagggggaagggcctcaaagccagaagattttattgtcaagatatccgagcttatgacattt

SEQ ID NO: 884890 - DNA, 76 bp, Homo sapiens
gtataatcctgcccttacacctgtgctcctatacaagattaacattcaatgcttttactgactctgctatcagtgc

SEQ ID NO: 884891 - DNA, 75 bp, Homo sapiens
cggcctcccagagtgttgggattacagttacatccagagcattccagttgttaatgaagaacacagaggtgattt

SEQ ID NO: 884892 - DNA, 100 bp, Homo sapiens
ccattatgctggctgttatgtacgcaggagaatcttgcctcctggaatccttcaaatcctgaatgtctcttacttgtggtgaaggaacttgtgcaacaat

SEQ ID NO: 884893 - DNA, 76 bp, Homo sapiens
cacgagcagatcctggtcctcgatccgcccacagacctcaaattcaaaggaaaggacttagaagccttacaaatac

SEQ ID NO: 884894 - DNA, 98 bp, Homo sapiens
ggcagcagagaccaccagaaggggttacagctgaagtaaagcacaacatcaccaacactgtggtatgcagagtgcaaggggaatggaatagtgttctt

SEQ ID NO: 884895 - DNA, 98 bp, Homo sapiens
atgatttctacttggtggtgtgtaacgactgtaatcaggttgtcaaaccgcaggcatttcaatcacattatggtccgggcccaccagctggtcttgcc

SEQ ID NO: 884896 - DNA, 99 bp, Homo sapiens
taaccactcctttgtggaggtcgccagggtcattgtcgtggatttgcacagtcggctgggcggtgcaatggcgcaaagccttctagacaagctcagtgg

SEQ ID NO: 884897 - DNA, 99 bp, Homo sapiens
ccaacacattgggatcttcaagggtcctttgagttcagttgtcttctcagagatgccaggaagcctcagtatctggagtccatctttcaccatcttctc

SEQ ID NO: 884898 - DNA, 100 bp, Homo sapiens
gagattttccctgtggatctgcagaagaaagctggccggggcctgggcctgagcatcgttgggaaacgtgctctggtctggggtctctctgtgaaacaca

SEQ ID NO: 884899 - DNA, 76 bp, Homo sapiens
gaggaactttggcaagaagacccttacgaatatatacgcatgaagtttgcttcttggacacttaatgattgttggc

SEQ ID NO: 884900 - DNA, 99 bp, Homo sapiens
cgggatctcaggtcctcgggggcggcggccacgccaaggacggaatgacagcccatatcaaggcggtgtattctttttgacaattcattttcctacaga

SEQ ID NO: 884901 - DNA, 99 bp, Homo sapiens
gaagctgccggcagccctgcggctacggagacaggtctggtgtggcagatgtggatagctggaccctcctgggtgcctctgcgttatgtcgtttggttg

SEQ ID NO: 884902 - DNA, 100 bp, Homo sapiens
ggtcagcggggctgcgagcactatgacagaggatgtctcctaaaggttattgttgtgggtaatccagccaataccaactgcctgactgcttccaagtcag

SEQ ID NO: 884903 - DNA, 99 bp, Homo sapiens
ttggagtaacacagagtctggatcgggaaacaaaagagcgctttgtcttaatgattacagctacagattcagttggagtcattcgttgcccagtttgca

SEQ ID NO: 884904 - DNA, 99 bp, Homo sapiens
gtgcctggagatgaagctggaaagattgagaggatccagaatccagatctctggaatagctaccaggcaaagaaaaaaactatggatgccaagaatggc

SEQ ID NO: 884905 - DNA, 100 bp, Homo sapiens
tgtaaaggaagctcaagtatatcaagcattcaaattgctcacagctgatcctaagcagagagagatcatcattgcctgaatttagctttgtgactgcaag

SEQ ID NO: 884906 - DNA, 76 bp, Homo sapiens
tgggaagagggcttcgtgccctgtgcacgtttgccacctagtgaccaaactgagctggagtggaatggcgcaatct

SEQ ID NO: 884907 - DNA, 98 bp, Homo sapiens
acaagcggtggtgaggcaggctcgcctcctccagctgttgttgctgctgtttgctaatccagactttacacaacctatctcagaagttgtagatgaag

SEQ ID NO: 884908 - DNA, 98 bp, Homo sapiens
agcaacattgactacgaggaatggcggcggctgccgcaggacctgcagcatcccagaggtcttccgggctgcagggctccctcaggcagaggctatga

SEQ ID NO: 884909 - DNA, 99 bp, Homo sapiens
catcaatgctatgttactctcagttctggaattattctccttttggagaatctggtcgagaagtgaactgaaggagaagtgtggctgtacacgatgctc

SEQ ID NO: 884910 - DNA, 99 bp, Homo sapiens
ttctctagaccttgccaagatggcacagatcaatgtccgagttaccaccatggatgcagagctggagtttgcaatccagccaaatacaactggaaaaca

SEQ ID NO: 884911 - DNA, 99 bp, Homo sapiens
ccaaagttcccttacacgcgtcgccgaaacccctcctgtggaagtgacaatgattctgtacagcctgtgaggaggagatgaatttaaaggtcattcttt

SEQ ID NO: 884912 - DNA, 99 bp, Homo sapiens
gagatcttccgccactacgagcatctctgccggccttgccacaaccgtgagaaggccaagggcctgggcaagtacatctgccagcggtgccacctggtc

SEQ ID NO: 884913 - DNA, 98 bp, Homo sapiens
ctaacctcgtgagaaaagctttacgtctcattcaagaaaccgaagtgatttccagaggatttacactgattcactccttctccagttgcacagccaca

SEQ ID NO: 884914 - DNA, 76 bp, Homo sapiens
agagatggcagataattttaagtctgattattttaatatgccagtccatgtagatgacattaatgctgataagaat

SEQ ID NO: 884915 - DNA, 76 bp, Homo sapiens
acagatacggagcacgaaaacaagtccgacagtgagaatggtttatggctacaaatgatttgatgacggaactgca

SEQ ID NO: 884916 - DNA, 100 bp, Homo sapiens
ggatgtggatggaagcatggtgcctcctgaatgaaacaagtgttgaaaatgttaaaggctgtgctgaagaagagccgagagggaggaaagggaggcaaga

SEQ ID NO: 884917 - DNA, 99 bp, Homo sapiens
ttgttgaagaggtcataggggttccacagtcttttcagaaactcatatttaaggaccagttggaatgccaaaaatggaaaaagtctacttacataatcc

SEQ ID NO: 884918 - DNA, 73 bp, Homo sapiens
ctccctccaggcttcagctataaggctggatgtagatgtctcgccgcaagcaagcgaaaccgagatccctcaa

SEQ ID NO: 884919 - DNA, 98 bp, Homo sapiens
ggagagaagcggatcccgtccgagccccggccccaagtaacgccgccgccccggagccgccgagctatgaagacatgattggtgaggaggtgccatcg

SEQ ID NO: 884920 - DNA, 99 bp, Homo sapiens
ctgatgcatttgcacctgtggcttatctacgctttttagaattgcacttggaggacaaggggagagtacggtttccatgaatatacagaggtcaaaaca

SEQ ID NO: 884921 - DNA, 98 bp, Homo sapiens
ggctgccctgtggcctcgctcctcggaggccattcgttatctatgacatgaattccttaatgatgggagaagataaaatcaagttcaaacacatcacc

SEQ ID NO: 884922 - DNA, 99 bp, Homo sapiens
tatgaagctgttcatgatgctggtaatgactcaggtcatggaggagagtctaatcttgctttgaagcgacagcaccagttgcccttgaagcagaaaaca

SEQ ID NO: 884923 - DNA, 99 bp, Homo sapiens
ataaactggtacaaaacaacgtgttattgatcttcgctgtaacccaagaacaagttcatttatatgaggaaaaatggaggctgcttccagcatttttaa

SEQ ID NO: 884924 - DNA, 99 bp, Homo sapiens
cggctcccctctcaggacaacccagatgtgcaacaaagtgcgatgcttgatcctctcccagaaaaggttttacagcaaagacccaatgcaaacgctgtc

SEQ ID NO: 884925 - DNA, 99 bp, Homo sapiens
atgtggggggtaaaccactcgagtgttgcggagataggaacatgggagagaaacaatctgggtaacatgaaagtgatgctggttgctaagggaaggcaa

SEQ ID NO: 884926 - DNA, 100 bp, Homo sapiens
ccgaagagagctgtcccagaagaaaaagttctgaaactcaaacctaaaagagaggaggaaccaccagctaaaggtcgctgacaaagtgaagcggtttttc

SEQ ID NO: 884927 - DNA, 99 bp, Homo sapiens
gctcggggctgggcgcgctcccgcggagccggagccgcagaggctcccgggctggactcaggcttctcagggccaattcctgtccccccagcagcatgg

SEQ ID NO: 884928 - DNA, 100 bp, Homo sapiens
gcctgattacaggagctttaacagggtgagcagggcagcatttccttctcccactgctgctgagatggcagaaattagtcgaattcagtacgaaatggaa

SEQ ID NO: 884929 - DNA, 99 bp, Homo sapiens
aagttagagtgcccttctcctgcggaacaacacccagtcagcttgaagagtttcaaatggaccctaccactgagaaatcaagatggcagtctactatgg

SEQ ID NO: 884930 - DNA, 75 bp, Homo sapiens
aacaaatgtttccttaaagtgcctcgatctaaggatgaccctggaaagataaccatgatgactacacagacttct

SEQ ID NO: 884931 - DNA, 99 bp, Homo sapiens
ggagggataggatgggcattgctcaaaaagaggaaaacggacgatgtattactaagctggaaaacatggggtttcgagtgggacaaggattgatagaaa

SEQ ID NO: 884932 - DNA, 76 bp, Homo sapiens
cggccagccagtcatcaaacccttatgtttgatcatcggccaaggtcctggcgagaactgcctctgcggctagctg

SEQ ID NO: 884933 - DNA, 69 bp, Homo sapiens
cctgctgtcaggctacatcagcaaaggggtacttttacagcgggttgatgaactagagaagctattcaa

SEQ ID NO: 884934 - DNA, 99 bp, Homo sapiens
ttggggacctgggagccccctccgagttacacctccagagccaaaagtactatcatggtgaacttacttcagattgtgcgggaccactgggttcatgtt

SEQ ID NO: 884935 - DNA, 98 bp, Homo sapiens
aacaccacaataatccacagccaaggaagaagagtgacaggaccaccctagattcacaggaaggggactacacaacgttatgaacaccaagaggcggt

SEQ ID NO: 884936 - DNA, 100 bp, Homo sapiens
tgctatactaatgaaaactgcagaagagaacctcgacagaagagttccaattccagtggaccgtagttgtggaggattttcaaaagaatgctgaaccggg

SEQ ID NO: 884937 - DNA, 74 bp, Homo sapiens
catgattacacatggtgtggatgtgacagcccaagatactaccgaatcctggaagcctactgatactgaaggta

SEQ ID NO: 884938 - DNA, 99 bp, Homo sapiens
ccatgggccccgcgggccccgcggcgcagtaccaggtactccaaagattcaggtttactcacgtcatccagcagagaatggaaagtcaaatttcctgaa

SEQ ID NO: 884939 - DNA, 99 bp, Homo sapiens
attcctcttccatttcctccccagaaacactgtactttatgaagctcctccaagacgcctgagggagagggaaaagcggatacccacctgtgtcgctgt

SEQ ID NO: 884940 - DNA, 72 bp, Homo sapiens
aacaaacggcaaagaacttactgattcttgaggttcaaaccttgtactactcagctgatcacaagctgcttg

SEQ ID NO: 884941 - DNA, 76 bp, Homo sapiens
tataagaccatttatttctttggagacaaaactatgccagaatctacttatgggacccatatccatgagaaacgtg

SEQ ID NO: 884942 - DNA, 99 bp, Homo sapiens
agttgcgtgaggggtttgtactatcctcggtgctgtggtgcagagctagttcctctccagctcagccgcgtgctggagaatctggtaaaagcaccattg

SEQ ID NO: 884943 - DNA, 98 bp, Homo sapiens
taacataccaagtctatgaggaacaagtatgaagtgaaggctcctgttccttctgcctgtttcaggaatatttgtaagcaaatgacaaaaatgcacga

SEQ ID NO: 884944 - DNA, 100 bp, Homo sapiens
cgggcatcttgctgttcgtgattatatttcttggagttgtgttggtaatgaagaaaaggatccaccttgatgttcagtgaagagtaccagaaaagtctgc

SEQ ID NO: 884945 - DNA, 99 bp, Homo sapiens
tgaagaggactcaggagcaaatcagtaatgagggaaaacccctgatcctaaaatgaatgctaggacttacatggatgtaatgcgagaacaacacttgac

SEQ ID NO: 884946 - DNA, 99 bp, Homo sapiens
ttctcgagaagacactacagcctcaaggagccctgaccctctattctgcaccctgtgagccaccgagactgaaccaaacccaggaagcggcgccaccaa

SEQ ID NO: 884947 - DNA, 99 bp, Homo sapiens
ctgtcggtttcagaaatgccttgcagtggggatgtctcataatggtatggcctcacaagtcttggtctacccaccatatgtttatcaaactcagtcaag

SEQ ID NO: 884948 - DNA, 100 bp, Homo sapiens
gtcttgggcagcatgcagtgctttctggacttggggacagagagcgtcagtggcaccctcagttcactccagcaatgtaatccccgtgacggctttgaca

SEQ ID NO: 884949 - DNA, 98 bp, Homo sapiens
tgcttcccatcgaagctctagaaatgaatgtttccatctcttcagagatgaaccaggtggaatatgtgatcaagtgtgacatgtcagctctgcagaag

SEQ ID NO: 884950 - DNA, 98 bp, Homo sapiens
tgggtgttttgctaccgtgaccgtttagtgtcccaccagtggcagagtgggctgttcctcagtcatcaagactgaaatacaggcaattattcaatagt

SEQ ID NO: 884951 - DNA, 76 bp, Homo sapiens
cgaaaataccgagtttgtaatgtgactagacggccagccagtcatcaaacgacattttctacattgaaaaccaaaa

SEQ ID NO: 884952 - DNA, 100 bp, Homo sapiens
cagaatcagatggggacacacagtcagagaaaccggggcaacctggagttgagacagacgactgggatggaccagagctcagagttctacagagtcacca

SEQ ID NO: 884953 - DNA, 98 bp, Homo sapiens
ctgagagggaaaaggacgccgcggtcttcccaggcgtcgcggagagcagtgctttctcctgctcaagacagccacacgaacacggatctccccccagt

SEQ ID NO: 884954 - DNA, 98 bp, Homo sapiens
cgccactccagaaatccaggagattgttgataaggttggcgggacgaagactggcgtggtgcggtacgtgggggagacagactttgccaagggcgagt

SEQ ID NO: 884955 - DNA, 76 bp, Homo sapiens
cccgctctggaagacattctgcactgcgggaggctgccggcgtggaccgcgggaaggcggggctggggctcggcgg

SEQ ID NO: 884956 - DNA, 99 bp, Homo sapiens
ttttatccagctctaaactttatttcctcccagaagacactccccagggcagaaatagcgaccatggcgaggaaaaggccaaagttgttgagcccctgg

SEQ ID NO: 884957 - DNA, 74 bp, Homo sapiens
tcatcaaaaatagtgatagctttgataaggaagaggaagaacgtctgagaaataaaattcgagctgatcatgag

SEQ ID NO: 884958 - DNA, 99 bp, Homo sapiens
ctgaagttcatcgccaggactgtgatggtacaggaagggaacgtggaaagcgcatacaggaccctaaacagcagcgtcaccctttacaccagaaagctg

SEQ ID NO: 884959 - DNA, 99 bp, Homo sapiens
ctatatctgtaaagggtatctgatcaagccaacaacagtgacggaatgcctccatacatacttttcccaggtccctcgtatcaaaacattaagagtata

SEQ ID NO: 884960 - DNA, 99 bp, Homo sapiens
tcgacttgagcgaagttttatgcaaggacagtcattttgtttactcattcagccctgttgcaggtcccaataaactcttcataaggttgacagaagcac

SEQ ID NO: 884961 - DNA, 98 bp, Homo sapiens
ctaaatatggttaaaaaacagtgtttcaagaatgatattcacaaactggtcctagcagctttgaacaggggctgttgataatcaggtgtatgtggcca

SEQ ID NO: 884962 - DNA, 98 bp, Homo sapiens
ggctacgccagcttggaagaagatgatgaagacctttccccaggtgtggaccactacaacgaggtgaagagcgtcaccatctgcgattacctgccccc

SEQ ID NO: 884963 - DNA, 99 bp, Homo sapiens
agctataaggagattttttaaaaattaaacttcaacacaatgagtgcacagccagagaacaacacatcacacacaggaaacagttgtgctcatgtgatg

SEQ ID NO: 884964 - DNA, 99 bp, Homo sapiens
aagaaataaagacactcaaccagaaggaggctgtggcctatgcagtcaactcctggaccactagtagtttatgtggccgaggcagacaagtggaattag

SEQ ID NO: 884965 - DNA, 76 bp, Homo sapiens
atttttggtgtgaaaaatacagagctggctgtcttccatgatgaaacaggtgaagaacaaattggttttgagctag

SEQ ID NO: 884966 - DNA, 99 bp, Homo sapiens
aagacctgacaaaggacatggacgagccctcaccagtccccaatgtagaagaggtgacacttcccaaaacaggagtacgaccccagcaaagcgaccttt

SEQ ID NO: 884967 - DNA, 99 bp, Homo sapiens
ttcacggacagcccccagtaaagtccagcgccgaggatggcaccaggatctccctaatactatgaacgcggcagagataacggacaagctcggcctcca

SEQ ID NO: 884968 - DNA, 76 bp, Homo sapiens
gaccctttggggctcagtggagtgaatctaacattataagcatttggaataatgggaaaggcattccagtagtaga

SEQ ID NO: 884969 - DNA, 98 bp, Homo sapiens
cacattacaacttcaagaaaattacggtggtgccgtccgccaagttacatggacacagaacagtatgaagaagcagtacgagactatgaaaaagtata

SEQ ID NO: 884970 - DNA, 99 bp, Homo sapiens
attgctgaacttaaaaagcagtctaaacctgtgaccacccctgaagaaattgcacaggtgtgatgaatgcagactctgctaccattttggctgtttgga

SEQ ID NO: 884971 - DNA, 76 bp, Homo sapiens
aatgtgtgtgaattggatttgatcttccatatggataagtatcctagaaggaaaacatcaccatggctacagaaat

SEQ ID NO: 884972 - DNA, 99 bp, Homo sapiens
tttatcatgaccgtgttcaggcaggaaaacgtggatgattactacgacaccggcgaggaacttggcagacaggtgatttggcttctgcacagttaggag

SEQ ID NO: 884973 - DNA, 98 bp, Homo sapiens
gctccgccaagaggcgccgcaggagctgccttcctatttcaaggaaagacgccaaggtaattttgacccagaggagcaatgatgtagccacctcctaa

SEQ ID NO: 884974 - DNA, 99 bp, Homo sapiens
tttgatgttgcaagtatcatcctgggctccaaggagaggggattgtggtccatcaggagtctgtgtgtgccacctatggaagtggcttaagcagcacgt

SEQ ID NO: 884975 - DNA, 99 bp, Homo sapiens
gctactttagctaaggcatgaccagcaatgaacagtagtaagatgtgttcagagcaacattgttttgttgacacaagcatttagaagaaagtttgtgat

SEQ ID NO: 884976 - DNA, 98 bp, Homo sapiens
ggcgctccgcttcctggagaaggcacagcggctgtatccgacgccgcgagttcgcgatcttcctggttcataaatctaccaagatgcagaagaaagtc

SEQ ID NO: 884977 - DNA, 100 bp, Homo sapiens
attttggaacctcttcgaggccatcctgcagttccagatgaaccatagcgtgcttcaggccctcagcatcctcatgctccctcacaacatcccgtccagc

SEQ ID NO: 884978 - DNA, 76 bp, Homo sapiens
cagccgccggcgtcgccgccatggacctagcatgtgcagtctttgccaacaaaaaaaattaccaagaaacctattc

SEQ ID NO: 884979 - DNA, 98 bp, Homo sapiens
aagaagtggctgtagggagcatagctgctacactgaagatgaagcaaggcccaatgacccaggcgaatggcctgtccagaagacagccaaatacatcc

SEQ ID NO: 884980 - DNA, 76 bp, Homo sapiens
cataataagatatttgtgaaccaaggcctactgaacttgacgcactggtatttggccatctatacaccattcttac

SEQ ID NO: 884981 - DNA, 98 bp, Homo sapiens
gcgatgctcccagcccggtgagacctgcctgaatggcgggaagtgtgaagcggccaatggcacggaggcctgcgtgtattgttgcagcatctggcagt

SEQ ID NO: 884982 - DNA, 99 bp, Homo sapiens
cctccaggtgacagcaatcagctggcctggtttgatactgacctgtaaatcatcctttagatgaagcccggggcaagaactgtggtgtcttggtacatt

SEQ ID NO: 884983 - DNA, 98 bp, Homo sapiens
aggaatgtgtttcactgtgaggcacacagaattctctacatttgtgaaagtcagtttctgaggaatttcatcaggttggtgaaagatgctccttggga

SEQ ID NO: 884984 - DNA, 76 bp, Homo sapiens
cagttgatggatatggttaggtgtcagcagcggcttctacgcagattttggaccactcaatctggcaatggtttac

SEQ ID NO: 884985 - DNA, 99 bp, Homo sapiens
aggatttctgaagactattgtggaagaagcatccattaaggtttttcagggacccctggctccaatgagaattctacccagaatgtgtataagattcct

SEQ ID NO: 884986 - DNA, 99 bp, Homo sapiens
cggcggccttcgaggaggtcatgaaggacctgagcctgacgcgggccgcgcgggcaacgcggtaaaaatattgcttcggtgggtgacgcggtacagctg

SEQ ID NO: 884987 - DNA, 75 bp, Homo sapiens
ggaggagattctgaagataaggaggttttaaatgcacagagagcaggatacaaggcagccatagttcacaatgtt

SEQ ID NO: 884988 - DNA, 99 bp, Homo sapiens
ctacgacgatcgggcctacagcagcttcggcggcggcagaggggtttcatcaccttaaatggttttgaaccaatgaaggtgtattcccttaaaaagacg

SEQ ID NO: 884989 - DNA, 98 bp, Homo sapiens
aaagattgcaaggtgaataaagaagtggagcgtgtcctgaaggagttccaccaggccgggaagcccatcgggtactccaaagattcaggtttactcac

SEQ ID NO: 884990 - DNA, 99 bp, Homo sapiens
gaagataaaatgaaagggttcagcttcaaagaagacactttgctgttgatagctgagatcacaaaatttgtccaggatagacatagagctagaagaaac

SEQ ID NO: 884991 - DNA, 100 bp, Homo sapiens
agaattctcacaccctcctcagtcacaacgcatgcaacaagattccagactccatcatttctcgtggtgttcaggtgctcccacgagacacagcctccct

SEQ ID NO: 884992 - DNA, 99 bp, Homo sapiens
ggggcgcagagcgcgggaggcggcggcggcgcggagcccagttttgtttggctatgccaccacagtcatccccagggtctatacatactatgtttcaac

SEQ ID NO: 884993 - DNA, 99 bp, Homo sapiens
gtccagtcccgggcgggccgtcgcgggagaggatgggagtcccagcttctggagacggggttcctggggatcttcctgtgccctctgtggacgctgtca

SEQ ID NO: 884994 - DNA, 98 bp, Homo sapiens
caggaactctacaacccaatccagtactatactggcaattgctggagaagattttgcaattgttgcttctgatactcgattgagtgaagggttttcaa

SEQ ID NO: 884995 - DNA, 99 bp, Homo sapiens
cagttaaagagcaaggacttcgttcaagtcatgagacataggagatacaacagcagattctacagcaaaaacacagtatgatattacttgagaatcaaa

SEQ ID NO: 884996 - DNA, 98 bp, Homo sapiens
agaagtccagagctgaggactgcctgtttgcaggtaaggggcctggataccaagaagtgactgctcatctaatccataaagctatgttaacagattgg

SEQ ID NO: 884997 - DNA, 99 bp, Homo sapiens
accagcaaccatgagtggttccatgatgggaagtgacatgatggcccactgcgtgaccttggttcagctgtccatttcctgtgaccatctcattgacaa

SEQ ID NO: 884998 - DNA, 99 bp, Homo sapiens
taaggaatgcaattctgccaccatgatggaaggcttgttgattggtgctggctgtgccctctaccccttgggctgggacagtgaggaagtccggcagac

SEQ ID NO: 884999 - DNA, 98 bp, Homo sapiens
gcggacggagctgttcattgccgccgagggcattcacacgggccagtttgtgtattgcggcaagaaggcttttcctccgcaaccatgtctgacaaacc

SEQ ID NO: 885000 - DNA, 98 bp, Homo sapiens
tagtgttggtgcttcttttcagtgccagtccatccatcacgaccacatttgtcatgatgacagtgacaaggcaacatcagatgctgacctgaaagaac

SEQ ID NO: 885001 - DNA, 76 bp, Homo sapiens
cttggctcctccattctgcttttaagtcaatgtgcgaaatggaatgagcttgcatgactgccttatgaaagcactc

SEQ ID NO: 885002 - DNA, 98 bp, Homo sapiens
acaccaacacaaagtaagctgctaaaatacagaagatccaaggagcagcagcagaaaattaatcagttagtcactgccctgggaagaactaggatgag

SEQ ID NO: 885003 - DNA, 98 bp, Homo sapiens
ctccccagccatgcagaactgtgccttagctggaccaattattgtggagccacatgtcacagcagtatggggaaagaatgtttcattaaagtgtttaa

SEQ ID NO: 885004 - DNA, 76 bp, Homo sapiens
cgcaaggtggccgttactgatcttacttcatccagtctaatagggctccacgtgttccccacgtttgtggcgtacg

SEQ ID NO: 885005 - DNA, 99 bp, Homo sapiens
gtggcgcctaaagtctgagagagggaagtcgcctctgtgctcgtgagtgcatggggtataaggaaacatctttacacagcagccaagttactacagtga

SEQ ID NO: 885006 - DNA, 99 bp, Homo sapiens
ttcaccaccagaatctgaatctccaagaaacactgaagagagtagcaaattgttcaggtccattgcaaaagaacttgcagactggcttattagcaacaa

SEQ ID NO: 885007 - DNA, 75 bp, Homo sapiens
gcaagagatgaccttatcacaaacggtgtgctgctgaggactgtcttggaccctgtcactggggatttgtctgat

SEQ ID NO: 885008 - DNA, 99 bp, Homo sapiens
cggccggagcgggcggctgagacaaaggcgacgaattctgcttggtcagaatcgtgatggcattgtgttcagcactgatgactattttcaccatcaaga

SEQ ID NO: 885009 - DNA, 99 bp, Homo sapiens
ccttcagcaggatcctgatgccaaagtagcttgtgcaaaccagtccagctacgggggcccagccagccagcagctgagtgggggttacggaggcggcta

SEQ ID NO: 885010 - DNA, 76 bp, Homo sapiens
ccactgtgaagtcaccatgcgctacatcaacggccttgaccgattgctgtcacgtctaatgtggctgctgcctcgt

SEQ ID NO: 885011 - DNA, 99 bp, Homo sapiens
ccgctgattgctatcacttctgcagaatccagtgggcccggattgcatttctacaaggcgaaagaaaaggtcaagagaacctgaagaaggacttagtaa

SEQ ID NO: 885012 - DNA, 99 bp, Homo sapiens
cctcctgagtagctgggattacagcggatgcagtggtgcagtatgacgtggagctgattgcactaatccgagccaactactggctaaagctggtgaagg

SEQ ID NO: 885013 - DNA, 99 bp, Homo sapiens
cagcatcgacctccggggctcaagtgatcctttcatctcagcctcctcagtagctgagactacagcctttctgagaaaagtctacagcattctttctct

SEQ ID NO: 885014 - DNA, 98 bp, Homo sapiens
aaaagtagaaattgatcagcaacaactaactcagcagcaacttaatggaaactagacatatctgaagagatggattaagaatgctttggattaaggat

SEQ ID NO: 885015 - DNA, 74 bp, Homo sapiens
agacaatctacaacactgtgaaagactgtccaggacggccggcagtttctaaagtatgttgaccccaagctggg

SEQ ID NO: 885016 - DNA, 100 bp, Homo sapiens
aacgcattcagatgcatcagccgtttgtaaagcacctgtcgtgagccaggtaatttcatgctcccaaaatgggacataaagtggttgtcttcgacatttc

SEQ ID NO: 885017 - DNA, 98 bp, Homo sapiens
ccacggatatcaaagaggccaatttctttggcagactggcacagcctccaggttggcgggctcatctgcgctggggttctgtgcgccatgggcatcat

SEQ ID NO: 885018 - DNA, 99 bp, Homo sapiens
cagactcttcaaaacgcactcattcagtttgctactagctctggtagctgaagaacatctcacagtggacgccagggtctattcctacgctctagcact

SEQ ID NO: 885019 - DNA, 98 bp, Homo sapiens
tttgtggctgtgcttgccaggcctggctccaggcatatcgatgcatttacttcaaaactttttctactggaagaaattacctcagaagaattaaaaga

SEQ ID NO: 885020 - DNA, 99 bp, Homo sapiens
ctccattgatcagcgctacctgtacgtcatgtctgagagacaggtcggattattgtccttatgaaatagttaaacagcctcgccatgtgccagaagaat

SEQ ID NO: 885021 - DNA, 99 bp, Homo sapiens
tcaaagaggtcttcgacaataaattccacatcatcggcgcagtgggcatcggcattgccgtggtcatgtcccaggacatcaaagctctgcagaaagaac

SEQ ID NO: 885022 - DNA, 100 bp, Homo sapiens
cgaaccccgcgtggctctgggacgcctgccgcctgcggccgaggactatgacttgagccagctgcagcagcctgacactgtggagcctgatgccatcaag

SEQ ID NO: 885023 - DNA, 76 bp, Homo sapiens
aagaggaatccaaagagccccctatcaagcttccaaagttgaagcatatgtcctgtgagcttaggggtgctacaag

SEQ ID NO: 885024 - DNA, 99 bp, Homo sapiens
aagcttccaggtgtcccagaaacccaggaaatcgagactcatgactcccagagaggatggcatctagaagaagccctacaggtggcaactactagccca

SEQ ID NO: 885025 - DNA, 99 bp, Homo sapiens
tgggaaatgacatctcgctgtaatgcagtgggagatttcagaagttgattgcaaagatgcactggaaatgatctgtaacttagaatctgagggtgatga

SEQ ID NO: 885026 - DNA, 73 bp, Homo sapiens
ggaagtgagaccgaaatagactctgaagtaatatctggactttgaaattctctactgagatgaagaaagaaaa

SEQ ID NO: 885027 - DNA, 98 bp, Homo sapiens
cacagatgagtaacgtgaatttgtccgtctccgacttctggagaatgagctgaaagccagtggtggcgaaatcaaaattcataaaatggagcaaaagg

SEQ ID NO: 885028 - DNA, 76 bp, Homo sapiens
atttcttcctttcaacctccaaacccagttgatgggacattcatcctgccaggacaacaacaggctggagttgttg

SEQ ID NO: 885029 - DNA, 99 bp, Homo sapiens
gatgaaccctttgtggaacaccatggtcatcggaggctatgctgatggagagagaatcggtcgaggtggacggtttggccgtaaaggtgtggctattaa

SEQ ID NO: 885030 - DNA, 100 bp, Homo sapiens
atcaaggctgcctataatcaagtaaaaacaatagctcaaggaaacctttccaacacagatgtccaagctgccaatgttcctggaaaacaatggaaaggac

SEQ ID NO: 885031 - DNA, 99 bp, Homo sapiens
acgaagaagcagaagcgtctgctcaggttgcagcaggagagagatgaaggatttgggggcagagcacttggcaggtcatgaaggggtccaacttctcgg

SEQ ID NO: 885032 - DNA, 99 bp, Homo sapiens
gagttgtctgtgcagatgtacgcccaagccgccctggatggagactcccagtttgtgtttaagatcactacgaccaaacagcaggaccacttcttccag

SEQ ID NO: 885033 - DNA, 100 bp, Homo sapiens
caacaatggatggcaactccctgctctcggtaccaagctgccttcctatttcaaggaaagacgccaaggtaattttgacccagaggagcaatgatgtagc

SEQ ID NO: 885034 - DNA, 99 bp, Homo sapiens
gacgaccctgaaagattcagcctcttcatcctcaaacagaggctgataaaataccagtaatgcgtggacagtggtttattgacggcacttggcagcctc

SEQ ID NO: 885035 - DNA, 76 bp, Homo sapiens
cccaggatgggggacaggaggctgcggggcctcaggcggcatgcgttcctgcggacgatcgcatcttgtgtcgctg

SEQ ID NO: 885036 - DNA, 98 bp, Homo sapiens
aaaatctatcgtgaggttcagctgatgaagcttctgaaccatccacacatcataaagctttaccaggttgccaacgtcgagctctgttacagagccct

SEQ ID NO: 885037 - DNA, 99 bp, Homo sapiens
ctgcagaagtgtcagagactgaggacttaaatgaagccactgattagcaatttaaagatcctctccaagcatccgcacttccactaatagccaagtaga

SEQ ID NO: 885038 - DNA, 99 bp, Homo sapiens
cttggaagaattgcagtagcagaagtcctggctgagcaaggttggaagccctagttctcgcattgaccgcacaaacttttctaatgaaaaaaccatctc

SEQ ID NO: 885039 - DNA, 99 bp, Homo sapiens
ggcgccttcgcggaccgagcctgacggagccggaggctgggagccgcggcggcctggggggctgggaaccgacgaggactctctcattgagatcatctg

SEQ ID NO: 885040 - DNA, 75 bp, Homo sapiens
ctaggatgatatatgaagattacatttctatactatcaccaaaagaggtggataagattgtggaccagctgcagc

SEQ ID NO: 885041 - DNA, 98 bp, Homo sapiens
cggaatccctaagccagtgcgtccaatgacgtggaagctcctctcaggtcaccgggagcaagaagtccaccaagaggaccaaatccatcaacggctcc

SEQ ID NO: 885042 - DNA, 99 bp, Homo sapiens
agctctggagacgcggcctcggaccagccatttcggtgtagaagtggcagcacggcagggtgttttgaatgctgtatcaaatgcctggggggcattccc

SEQ ID NO: 885043 - DNA, 76 bp, Homo sapiens
cctgagcgccgagcctggggctggggccgcggtgctgaggacgcaaatgtgttagagatgtttatgattacttccg

SEQ ID NO: 885044 - DNA, 100 bp, Homo sapiens
cctcttgccctgtgatctgcaggttctgggagacgcacagctaagatgccaggacatcctggaagctgggaaaaggcaatttgtgtatggtgattggtgg

SEQ ID NO: 885045 - DNA, 100 bp, Homo sapiens
gagtcggggttgagccccagctgagccgagggctcgcactcttctggtctcccaggcccaacccacctgaagtctgcagatctccaggggagcccaccag

SEQ ID NO: 885046 - DNA, 98 bp, Homo sapiens
gggaaggcagcggccggagcgcgcaaggaagttggctggaatgtgatgacttaaaaggcccatgttctgaaaggcacaagaaatttgaagttcctgct

SEQ ID NO: 885047 - DNA, 76 bp, Homo sapiens
acacatgatccgcaagaacaagtaccgccccgacctgcgcatggtgtagagaggagagagagtgaacagggagcgg

SEQ ID NO: 885048 - DNA, 99 bp, Homo sapiens
tttaaaatcctcacttactatggagcccagaaagagaggaagctcaagcggcagtactacgagatgtcctacggcttgaacatcgagatgcacaaacag

SEQ ID NO: 885049 - DNA, 98 bp, Homo sapiens
cgatggccgggcggaagatggctgcccggagcgccgcggacagtcacgtggttcagccgtctgtatatctccccagatacctgaaactgaccacctga

SEQ ID NO: 885050 - DNA, 76 bp, Homo sapiens
gcggcttatcgaacagagccgggagttcaagaagaacactccagaggtcgttttctgatgtgacggctgagacatg

SEQ ID NO: 885051 - DNA, 98 bp, Homo sapiens
caaaacaacaaaccagaaatccgtctacagtctgaaataaatcttctcaccttggaaaagatctgaaaaccatgagtgaacgcctcaagaataggtac

SEQ ID NO: 885052 - DNA, 99 bp, Homo sapiens
ccaagtaccaggtcgtctcgcttacaagtaggagctaagctgtggatcatccatgccatggagtatgaacttcagatccgtggcggagacaagccagcc

SEQ ID NO: 885053 - DNA, 76 bp, Homo sapiens
aaacaggcggaggagcccagaggtctcctctgagcctccggcctccataagacccaaaacagatgacacctcttcc

SEQ ID NO: 885054 - DNA, 99 bp, Homo sapiens
tcaagtgcggtgctatgatccttaagctgagatgttctcagtgcagctgagtcttggtgagcagacatgggaatccgaaggcagcagtataaagaaggc

SEQ ID NO: 885055 - DNA, 98 bp, Homo sapiens
agagatctacaaccttggagcccagagccacgtcaaataatccagtccctcatagcactggtgaatgacccccagcctgagcacccgcttcgggctga

SEQ ID NO: 885056 - DNA, 98 bp, Homo sapiens
tcagtttgtgaaaggatttggtggaattggagactattcttgttcagtcctggtatccaatcacagtggccacaaattctagagagcagaagaaaata

SEQ ID NO: 885057 - DNA, 98 bp, Homo sapiens
ggaggagttcgggcaaggcgagtggagcgagtggagcccggaggccatgggcacgccttggacaggtgctgcagaaattggggaaagctgtagaaacc

SEQ ID NO: 885058 - DNA, 100 bp, Homo sapiens
acaacgtctggtcccaagctagatcttcgggaaaagggatcaaggaaatgactattcctccaaataaaatggacattagtcatgagtgccgagtgtgcgg

SEQ ID NO: 885059 - DNA, 99 bp, Homo sapiens
aggagaagccgcccaaagaactggttgaaaggattgttgacaaaaggaaaaataaaaaagggaagacagagtatttggttcggtggaaaggctatgaca

SEQ ID NO: 885060 - DNA, 99 bp, Homo sapiens
cggaagtgacgcagagaagtttccgggactgagaaccatggagtctggcagtaccgccgccagtgaggaggcacgcagccttcgagaatgtgagctcta

SEQ ID NO: 885061 - DNA, 75 bp, Homo sapiens
agccaggctgaagaagccagaccaagccatcaaggccgaggtggggacagcgccgttcgtcagcttcaggcttcc

SEQ ID NO: 885062 - DNA, 76 bp, Homo sapiens
gagagcgcgaatatcgtcatcgttagaaggattactacagcatcccatttcccacacccactactccgctgactgg

SEQ ID NO: 885063 - DNA, 99 bp, Homo sapiens
cattgggtgctgccacaaaggatgcctccacacctaccactacccgtgtgccagcgatgcagaggctgggaggcggcagaatgcagccagaggagggca

SEQ ID NO: 885064 - DNA, 99 bp, Homo sapiens
ggtgcttaccagctgtctcaggatccaaggaacgtttgggttttcctaggcttcctgttggataaaaaaattggagtaaatcaaccaaaacgaattgaa

SEQ ID NO: 885065 - DNA, 98 bp, Homo sapiens
tgcaaaagaagagaagcagaattatacctagaagtctactaatggacagttagtcacccacctacatgttgagggaggagctaacatttgagatgctt

SEQ ID NO: 885066 - DNA, 98 bp, Homo sapiens
gcagatttgcaaatacacacactgctccagccacagtggttcttgtgtcaagttcccgaggaaatgagccgatgtcgtaattcctataccgaacaaga

SEQ ID NO: 885067 - DNA, 99 bp, Homo sapiens
tcaaacttcagttttactgtgtcgacggatagaccacgtactcctaaatgctgatggcattcgaggttttccagttgttcttcagcaaatcagtaagag

SEQ ID NO: 885068 - DNA, 98 bp, Homo sapiens
agggtcacaggctgcccaccctttgatgaacacaagtgtctggctgagggagcaaaatttggtttctctaatattactggaattgattactctccttc

SEQ ID NO: 885069 - DNA, 75 bp, Homo sapiens
cagaagcgttgtcactgcagcaactgctggttcagaagcagcttcgccgacacgaggtgaccatctgcaattacg

SEQ ID NO: 885070 - DNA, 98 bp, Homo sapiens
ttcaaccatctggggtgccaacaagtggaccatctcagaccaccatacacttactacctacagttgatttggagcatatgcgaacaataaaacctgaa

SEQ ID NO: 885071 - DNA, 99 bp, Homo sapiens
tcccaaagtggtgagattacaggtagacccacaacttgtggatggacacctttcatattttcttggagctataggtatgcctggtttgacttccttgat

SEQ ID NO: 885072 - DNA, 99 bp, Homo sapiens
tgtcttttggtggaaacagctctactccaacaaccctgggttccaggttcctgtaatacttacctcacaggctaatgctcctctgttggctggaaacac

SEQ ID NO: 885073 - DNA, 76 bp, Homo sapiens
gaacagggctgggcctgagcatcgttgggggttcagacacgctgctgtacctaggtgctgatatggaagaatttca

SEQ ID NO: 885074 - DNA, 75 bp, Homo sapiens
aacaaaaatattgacaactttttaagcagatccaccagtggtaaaaacagagatggtaacaatttctgatgcctc

SEQ ID NO: 885075 - DNA, 75 bp, Homo sapiens
cggccgtcgatgaagaccctgtttgtggacagctacagtgagatgcttttctgtttttctgatcgaggctctctg

SEQ ID NO: 885076 - DNA, 98 bp, Homo sapiens
ctgagtgtgcccctgacatgacaaggagccgtcgtcgttagcttgctgcccttgaatttcctccaaagaaactatttggaaataaggatgaacgtgtg

SEQ ID NO: 885077 - DNA, 98 bp, Homo sapiens
aagaccatcatgctgcgcggccttcccatcaccatcacagagagcgatgacaccatcttcttgtattatacaagaaaggagtgtacctatcacacaca

SEQ ID NO: 885078 - DNA, 99 bp, Homo sapiens
tctctgtccgggggcctggctaaggaaaccctattacctccagggaagaaacccttttttcttggagccagcaataattatcacaattactgatgggag

SEQ ID NO: 885079 - DNA, 75 bp, Homo sapiens
ttcaaccccaggggaccagaggaactcagccctgattgcgggaggagtctgctactagtcttatcagctcttaaa

SEQ ID NO: 885080 - DNA, 98 bp, Homo sapiens
taggccacaatcttcaatgagtaaacatattcctgtttacccaaggtccagcctagcccctaggcaccatgtcggacagtgatctaggtgaggacgaa

SEQ ID NO: 885081 - DNA, 99 bp, Homo sapiens
cccttttgaagaaaagacaaaggtagaaaggatggtggaggactacctggcaagtggttatcaggtttgttttctgccctagacagtcattcaaatttg

SEQ ID NO: 885082 - DNA, 98 bp, Homo sapiens
aatgtcaagtgctccaaccctcaaatcaccgaggctgctttgtaccgcctcagtggagactggaatcccttacacattgatcctaactttgctagtct

SEQ ID NO: 885083 - DNA, 98 bp, Homo sapiens
cgaatccggcccgggaaccacctccaggactcagattgatggacaacttttcttaattaagcaccttttgatacttcgtgaacaaattgctccatttc

SEQ ID NO: 885084 - DNA, 98 bp, Homo sapiens
gcaggctctacactgggatgcatacggtcctgctgcatatctatgtgagactgaattttcctcttagacttcagctaaaactgtgtattgcatcaggc

SEQ ID NO: 885085 - DNA, 76 bp, Homo sapiens
cttctacattcgacctcttcgagcccttggctgagcactgtgttggagttcgctcccaggaccccgggcagcggcg

SEQ ID NO: 885086 - DNA, 100 bp, Homo sapiens
cacattctctgccccccacccaccgcgccggcgctcccttgtcacgcctcgggaagcgcgcacctgccaagcaggctatggagttactagtagagaaagc

SEQ ID NO: 885087 - DNA, 76 bp, Homo sapiens
cgctgccctacggcttctccgccatgcaaggctggcgcgtctccatggaggtaatggattaggaattagaattgtg

SEQ ID NO: 885088 - DNA, 99 bp, Homo sapiens
tagagggcagacccggactcttctggttcaacatctcaggtttttgccaatccagaagactgtgtagcatttggcaaaggagaaaatgccaagaagtat

SEQ ID NO: 885089 - DNA, 99 bp, Homo sapiens
aacctcagccctaacggtggtggagaacccaaagggttcttgaagcttttgagattaacaatggcaggaaaatcatcactttttaaagtaattctcctt

SEQ ID NO: 885090 - DNA, 76 bp, Homo sapiens
acaacaatgagatcgtggacaagatcatgggcaaaggacagatccaggagctgcccaatggggaccccaaggaggg

SEQ ID NO: 885091 - DNA, 99 bp, Homo sapiens
accaccttcatctccaccatcggtatcagtcagagccggatctctcattggctgttgcagcagggatcagacctgagtgaacagaagaaaagagcattt

SEQ ID NO: 885092 - DNA, 76 bp, Homo sapiens
atttgatgatgataatgtaatggctttatacaagaagattatggggaaccaacggaagccgaagccagagctagag

SEQ ID NO: 885093 - DNA, 99 bp, Homo sapiens
tgacatccctaccccagtgctcagcctttccatgctctccatcacctatcacagcagcatccgctctctggaggaacaggcctttgagagcagccagaa

SEQ ID NO: 885094 - DNA, 99 bp, Homo sapiens
tgtttgacaacatctgccctacccccatcctgcagaagttttagttactatccagcagaaaacttgatagagtacaaatggccacctgatgaaacagga

SEQ ID NO: 885095 - DNA, 76 bp, Homo sapiens
gccgactccgcgttcagcaaccccatccgcttccccttcggcttcacctggccggacgtgttcctcatgatccggc

SEQ ID NO: 885096 - DNA, 76 bp, Homo sapiens
cgaagaggctggactcggattcgttgcctgagctccagaacctgggtatcaacccagcaaacattggcttcagtac

SEQ ID NO: 885097 - DNA, 99 bp, Homo sapiens
gaaaaggagttcgagcagatcgacaagtccgggagctgggcggccatttaccaggtgaagtgccagcattataagaaaaaacgaacggagcaagaagaa

SEQ ID NO: 885098 - DNA, 99 bp, Homo sapiens
gatctacctgacgggcctgcgagggttgaagattgtgaagcaatagcctaagagcctcccctcccggaagtagaattttttacggtgcacagaggacct

SEQ ID NO: 885099 - DNA, 75 bp, Homo sapiens
caatggggaacgctcacggactgtgtggaattgactttaaaattaggaccatagagctcgatggcaagagaatta

SEQ ID NO: 885100 - DNA, 76 bp, Homo sapiens
acttcatcatccctgtggagattgatggggtggtccaccagaaaataaacagagttgtctttgttggaaacttttt

SEQ ID NO: 885101 - DNA, 98 bp, Homo sapiens
ctctactatgactgacaaggaaatggagtcaccagaatgtatgaaaaggattaaagttcagaagccccatgtgccactcccctgatctgcagcttcgg

SEQ ID NO: 885102 - DNA, 99 bp, Homo sapiens
tcctatcatctctccttcagccatgcttcctatctaccctgccattgatattgatgcacagaggcgtagaggctccggtgttttttgtgccaattgcct

SEQ ID NO: 885103 - DNA, 75 bp, Homo sapiens
aaaagcagcgaacctcgagaccaacgtggaggagctgtgggtggaagatttgctatgggatcatttatggaatgg

SEQ ID NO: 885104 - DNA, 76 bp, Homo sapiens
cagagaatacaaatttgatgtttcgtcagagttactagaggctgactcttgcttgtggtggggtggccctgaattc

SEQ ID NO: 885105 - DNA, 99 bp, Homo sapiens
agctgaaagccttactgatacttgaaggaggccagaaagttgttttcaaacctaagcgatccttgccagcacattacagaatatttttgttgaaccttc

SEQ ID NO: 885106 - DNA, 75 bp, Homo sapiens
ctttgctgtgccttctctactgatggcagtgttttagctgctgggttggtggagtccacattcaaactggtattg

SEQ ID NO: 885107 - DNA, 99 bp, Homo sapiens
ctactcaagccttattgaagagataggaactcttggttgggataatggccacagatgtctttaattccaaaaacctggccgttcaggcacaaaagaaga

SEQ ID NO: 885108 - DNA, 98 bp, Homo sapiens
tggagctccttttcctccacctaccttcccgaggaatgacagaggaagaggaagacaaacttctggcactgaaagacttcatgatgaaatctaataaa

SEQ ID NO: 885109 - DNA, 75 bp, Homo sapiens
gaccaaatttacgccatgaaagtggtgaagaaagagctggtgcatgatgacgagtgtcggagatgtatgcagtgt

SEQ ID NO: 885110 - DNA, 98 bp, Homo sapiens
gcgctgccgaggagaacccagcggatgctgaaattttcttctaaggagaaatatcccttatttacttttgtaaatggtcattccagagactatgattt

SEQ ID NO: 885111 - DNA, 100 bp, Homo sapiens
gacatttccaacatagatagaattggtcgatcagagcaacttgtagagacagtttcatgtggaggaaatcttttgatgaatattgggcccacactagatg

SEQ ID NO: 885112 - DNA, 98 bp, Homo sapiens
ctagactcatcttcacgggcttgtgttgccccaggtactgtcaaaggttaatgatgaaatggcaggtaattcacacttttggacagagcgcaccgccc

SEQ ID NO: 885113 - DNA, 99 bp, Homo sapiens
gggcggtcgagcagaacgtgtagccgcgtcccctccagtccgctccgggcagggcgcaccctacgacgcgcacaccaccggcatgaccggcgccatcag

SEQ ID NO: 885114 - DNA, 99 bp, Homo sapiens
caaaatctaccaggaagatatctttccatgtttaacattctcaaaaagtgagatacagtttatgtaacttgatggaagaaaatggaattactccaaaaa

SEQ ID NO: 885115 - DNA, 99 bp, Homo sapiens
gtatcatgagcattggatttgatcacatgggtccttcaactattctatgggaacccgggcattttcccatgacagtatttttatccctgatgggggagc

SEQ ID NO: 885116 - DNA, 75 bp, Homo sapiens
acaaaattcaggaaggactattctcattaaggaatacggggtgctttgcattcaggaatacagaaaaaacagcaa

SEQ ID NO: 885117 - DNA, 100 bp, Homo sapiens
cagctcgggctcttcatggccgtcatgccgactctcatacaggcgggcgccagtgcatcttctagaatgattgaagatagtgggaaaagaggaaatacca

SEQ ID NO: 885118 - DNA, 98 bp, Homo sapiens
tctgatacattggagaccattgctcctgagaaacttgcccaggccaaagaagagaacgtgggcttacatcagacactggatcagacactaaacgaact

SEQ ID NO: 885119 - DNA, 99 bp, Homo sapiens
ccgcagggttcggatgagaccaggtagccctaatggagaaccttgtggaaagacttgtttggaagagagagacaatcagtggttgggggtcacactttc

SEQ ID NO: 885120 - DNA, 99 bp, Homo sapiens
aaggattcgttacagccagagattgtgacctgggtagtttgcacggtttggctggaaaccacagtccccccatctctgccagaaccccccatgtggcca

SEQ ID NO: 885121 - DNA, 98 bp, Homo sapiens
atggctataatagaaggagcaaaatgtataaagggagattctagtatacaggtggttgcctatcactattgtcaagcagataatgcctacacttgctt

SEQ ID NO: 885122 - DNA, 76 bp, Homo sapiens
cagaggcgagccctggtggaggaagagctgaaaaagatcgggggcgggggctttggtgagatctacgaggccatgg

SEQ ID NO: 885123 - DNA, 100 bp, Homo sapiens
cgtcaccccgctgtgacgcgcacgctgtaggaaaactatttgtcccatcagatgaaaagaagaaacaaggttgtcaacgagaaaatgaaactctaataca

SEQ ID NO: 885124 - DNA, 99 bp, Homo sapiens
catggggacctccggggaggcctgccgctgtaagtttaacccagaactggtgctggtctcagctggctttgatgctgcacggggggatccgctgggggg

SEQ ID NO: 885125 - DNA, 99 bp, Homo sapiens
gagaaactggctgcagcagagcgagtacttcgttccaacatggacatcctgaagccaatcctggtcaatgtgacggtggactacattagaccagccagc

SEQ ID NO: 885126 - DNA, 100 bp, Homo sapiens
ctgtgaagcaaattcgtcagatcaaagaacaaggaaagaatacccacctcatgtccaaaaagttgaaattaatcctgtaaggttaagtcggctccaaggt

SEQ ID NO: 885127 - DNA, 99 bp, Homo sapiens
cctctacgaggtggatgtgacccaaggagagtgctacccggtgtactggaaccggggtcctgatgacaacttaattgaaggtggaggaacaaaatttgt

SEQ ID NO: 885128 - DNA, 75 bp, Homo sapiens
atctttcagagtgtaaagtaatcttggaatataaagaaatgcactcggtgatggaaagagagccactattctgaa

SEQ ID NO: 885129 - DNA, 99 bp, Homo sapiens
cacctttcggcttctgagacggcggcagcagcggcattcaggatggagagcaatacatcatcatctttggagaatttagcgacggcgcctgtgaaccag

SEQ ID NO: 885130 - DNA, 100 bp, Homo sapiens
cggcaagaagacgctccacgaagtcctggaaaaagtcttcaagtctttcagacctaacttggagcgtgatgcccagaagtgtgtgaactggtctgtgacc

SEQ ID NO: 885131 - DNA, 75 bp, Homo sapiens
cttgtctcagctgctgaagctggtctatgttaacaatgaatgggcaaccagtgttggggaaggagggagctttgg

SEQ ID NO: 885132 - DNA, 98 bp, Homo sapiens
ccgacggtcacccgaatcgcagggagtcgccgctggagaggggctcggcgcccggcggggactgcaggaacgagctagagcgacagtttcttgaattg

SEQ ID NO: 885133 - DNA, 76 bp, Homo sapiens
acattgcctttaccatggacaaactgatccagagcattgtcagacaggtctgaggtcaggaatgactcattgtaag

SEQ ID NO: 885134 - DNA, 99 bp, Homo sapiens
tggcatcagggaggctttcagccggagaagcgagtttcagctggtgccttatgtggatttggaacaccaaggaacctactggtgtcatgtatataatga

SEQ ID NO: 885135 - DNA, 99 bp, Homo sapiens
cctcggaggcgttcagctgcttcaagatgaagggccgttgctccagggagaactgcaaatatcttcatccacccccacatttaaaaacgcagttggaga

SEQ ID NO: 885136 - DNA, 98 bp, Homo sapiens
gagcaccgccgaggactccagcacaccgaggatctgactgcagccatgagcagcaatgagtgcttcaagtgtggacgatctggccactgggcccggga

SEQ ID NO: 885137 - DNA, 98 bp, Homo sapiens
ccatttcaggagtacctggaggctcaacggcagaagcttcaccacaaaagcgaaatgggcacaccacagttggaccctgggcgttttttacacatggg

SEQ ID NO: 885138 - DNA, 99 bp, Homo sapiens
gcaatgaaagaagctggtaagggaggcgtcgctgattccagagagctaaagccgatgacctgcaatgcttcttttgccacccgagaccgtctgcgctcc

SEQ ID NO: 885139 - DNA, 98 bp, Homo sapiens
tcctatctcgtacacttcttggcagtcatggacaagagctattgatagaaggtggcgtatgtgttcgtgttttaatgtattcagagccattgggcaat

SEQ ID NO: 885140 - DNA, 98 bp, Homo sapiens
gaaaattggcaaagctgtggaagactccaagccctactgggaggcacggagggtggcgaggcaggctaggcagctggaagagaaagaccgagtgctaa

SEQ ID NO: 885141 - DNA, 99 bp, Homo sapiens
ttcgaggctataactacgatgaaggtcattcaacatttattcaaccaaaaatactaagtcagctctatacaaactaatggaaggatacagctatgcaaa

SEQ ID NO: 885142 - DNA, 99 bp, Homo sapiens
ctcagccaggttctccagagatgctttgctctctgtacatgatactgtggctcagaagaattacgacccagtgttgcctcctatgcctgaagatattga

SEQ ID NO: 885143 - DNA, 98 bp, Homo sapiens
cctttttcaatctcttcgtgcttgtcgaaatcaggtagcaaaagaagaggatgtggagaactttgacgtgaccaacttgtctcaagacatgctgcgaa

SEQ ID NO: 885144 - DNA, 98 bp, Homo sapiens
cggcgctgtccctgatcgagcggcgggagcgagaatgggttctgggtgggtcccctgggtggtggctctgctagtgaatctgacccgactggattcct

SEQ ID NO: 885145 - DNA, 99 bp, Homo sapiens
aatgtatctaacgacctctcacagaaactatatgccaccatggagaagcataaagaggtttctacgataaagacagttcagggtggagttctagcaaag

SEQ ID NO: 885146 - DNA, 99 bp, Homo sapiens
accgcggcgcgagtcaccatggaatcctgaagtgggtaaaactgattgacaactttgaaggggaatatgactacgtgaccaatgaggggacggtgttca

SEQ ID NO: 885147 - DNA, 99 bp, Homo sapiens
caatgagtacaactaccgctgctggaccacaaaccgctgccagaaaatgaagcgtgacattcaggaaaacgatgaagaggcagtgcaagtcaaagagca

SEQ ID NO: 885148 - DNA, 98 bp, Homo sapiens
aacgcatcatgccagggagccaagcgtcctgcccggccagtgcctggtgaagaatgtgatgggatcactagcatgtctgcggagagcggccctgggac

SEQ ID NO: 885149 - DNA, 99 bp, Homo sapiens
cgcagcactggggaaacgatccgctcccaaaacggctttcaaggggggctgcaaagctcctcatgctatgatatcttcttgtggaacaatcccaggaaa

SEQ ID NO: 885150 - DNA, 99 bp, Homo sapiens
aagatagcaaaaccatacagggctatgatgctattgtggttgaacaatggacagtcctggaaaggcacagagctttggcctgctggatcccaaactctg

SEQ ID NO: 885151 - DNA, 98 bp, Homo sapiens
tgatcccatgactaaagtgcaggccgaactagatgagaccaaaatcattctgcttagcagtgtctgcaaaaacgaatcttttcctacaacctgttaac

SEQ ID NO: 885152 - DNA, 76 bp, Homo sapiens
ctcggtggaggccgacccatccagctcggaggagcttctacgtgtatgcgggcatcctggcactgctcaacctact

SEQ ID NO: 885153 - DNA, 100 bp, Homo sapiens
ttttgaaacaacttatgaaagtagatcctgctcacagaatcacagctaaggaactactagataaccagtggttaacacttctgaaagtacagagaagctt

SEQ ID NO: 885154 - DNA, 76 bp, Homo sapiens
gaacaaactcgaagaacagctgtggaaagaagttgcaaaacactggtcggaattgagatgggcgattggcaggaag

SEQ ID NO: 885155 - DNA, 75 bp, Homo sapiens
ccccaggtcactgtcacagggcccagaggactcggaggagagtgaaattgacatggaagatgatgatgacgagga

SEQ ID NO: 885156 - DNA, 99 bp, Homo sapiens
gataacctgtctcaaaaccctcctcatcatctactccttcgtcttctgggcacagcttcttcaaccaagcggagcacttctacaggtaataaagaatcc

SEQ ID NO: 885157 - DNA, 76 bp, Homo sapiens
caaagctggagctgcctcaagaggccgcatctacaagtgcttgtttactggctccgtgagctcactactgacgctg

SEQ ID NO: 885158 - DNA, 99 bp, Homo sapiens
agaacgatgtgaacatcgaatcatggaatcccttgcatggctctcactccatgatgcgttatctgggtctggaaacccaaaccctcaaggatggcctgg

SEQ ID NO: 885159 - DNA, 98 bp, Homo sapiens
aaacatacaatacctgtgatactcctccccctctcaacaatcttaccccttacagataacgaaggaggcccaacttcattcaataaggagcctgacgg

SEQ ID NO: 885160 - DNA, 98 bp, Homo sapiens
tgattaaatactggtttcacactccaccaagcatcccattacagatagaagaggccataggaaaaggatacagagtagagtttcatgaacctgaaact

SEQ ID NO: 885161 - DNA, 100 bp, Homo sapiens
ctaactgcggcgggcgagacgttctcagatacttcttgtgccttcagctccggcaggacattgcctctggccgcctgccctgctcttttgtgactcatgc

SEQ ID NO: 885162 - DNA, 98 bp, Homo sapiens
atgagacttatatgatgcaagatgtggcagaagaacaagaagttgagaccgagaatgtggaaacagccgcctttttatagccgaaacacagctgaaat

SEQ ID NO: 885163 - DNA, 99 bp, Homo sapiens
tttacactggacagcactttaatattcctgccatcacaaaagctggacaagcgaaggtgcccgggaagaacccaccgtccagcaggcacagcgtcggtc

SEQ ID NO: 885164 - DNA, 99 bp, Homo sapiens
gagtgtaaaaacaaaatgaactttcctaatggtgttacaaatggatactcttggtatccactccaagggcaggagcgatttggcaacatgacccgagta

SEQ ID NO: 885165 - DNA, 98 bp, Homo sapiens
gaaccacgtgtaccaagacccagcccaacttggacaactgccccttccatgaccagccacatctgaaaagggggatggagcctccattttctcacaga

SEQ ID NO: 885166 - DNA, 99 bp, Homo sapiens
agaaggattccgggagcacagttccgccgagtatttggctcgagtaggggagcttgaagctactgacactgaagacccaaatctgaattatggacttgt

SEQ ID NO: 885167 - DNA, 99 bp, Homo sapiens
catcacagctgagttcctgcagcctctgctgacgcctgataatgtggctaatctggtcctggatggaaggaagcccaccggggggaagctggaggtgaa

SEQ ID NO: 885168 - DNA, 74 bp, Homo sapiens
ccattatccacaccagcatgggagacattcacaccaaactttttcctgttgaggtcacctctgtccagtcagcc

SEQ ID NO: 885169 - DNA, 99 bp, Homo sapiens
tcagagaagaacttatcagagattgagaatgtccatggatttgtttctcattctcatatttcaccaataaagggaggaggtacaggagaactgtgtgcg

SEQ ID NO: 885170 - DNA, 99 bp, Homo sapiens
tacaagtggaccaactatctgagcgacagcccacctgaggatattgaccataaggactcatatctcattacaagaagcatcatggccgagccagactac

SEQ ID NO: 885171 - DNA, 74 bp, Homo sapiens
ccacagactaccagctgcagaaagtctggctgtagactgggtttccagaccaaactagagtcagaacgaatact

SEQ ID NO: 885172 - DNA, 98 bp, Homo sapiens
ttgcgatggcgcagaaaccccgttgacaaggcactgctttttcatgacggttgtggcagcactgcctgaaggtatgagaccagattctaatctttatg

SEQ ID NO: 885173 - DNA, 100 bp, Homo sapiens
tggagacaagaagctataagtatcttctcttgtccatggtgaaactaattcatgcagatccaaagctcttgctttgtgttgcacagagcattgaggatca

SEQ ID NO: 885174 - DNA, 74 bp, Homo sapiens
ccttgctgctgctcaaagctgctgccgccccttgggctaaaaggcatttgggcagtccttctccatccaccgga

SEQ ID NO: 885175 - DNA, 99 bp, Homo sapiens
caggtttaatagatgacaatgatctctaccgatgggaagtccttattattggccctccagatacactttagcaacagttacaacactccacaaatcagc

SEQ ID NO: 885176 - DNA, 99 bp, Homo sapiens
gccacaccaatgccagcatcatgctatttggtccttcacagggtggtccaggtcctcagtatcctaactacccacagggacaaggtcagcagtatggag

SEQ ID NO: 885177 - DNA, 76 bp, Homo sapiens
aatggcttgtttggtttcacaggagcttgtataccagagatgcaacagcattttgaatttgaataccagaccaaag

SEQ ID NO: 885178 - DNA, 99 bp, Homo sapiens
cgcgttggggtgagaccctcacttcatccgtctgatgccaatgcaagttacttaagagcagctcgagctggacaccttgaaaaggccctcgactacata

SEQ ID NO: 885179 - DNA, 99 bp, Homo sapiens
tgctggaggccatcttacccctggtgcagaacgatcctcgaattcagcacaggtaaagaacaagcacctttggagatgagtatgcatccagcggcaagc

SEQ ID NO: 885180 - DNA, 99 bp, Homo sapiens
acaattctattgcacatcaatgatatcatcccagcctctacggcagacacatgcaggccaacccagaaccaccgaagaagaataatgacaaatcgaaaa

SEQ ID NO: 885181 - DNA, 99 bp, Homo sapiens
ggctgtggtgatggatgaggtggtgctgacaatcgagcaaggaaacctgggatgcccaggtggacctgtttcgtgacatcactttctacgtctactttt

SEQ ID NO: 885182 - DNA, 100 bp, Homo sapiens
ctgcccgcgcgcatctggctgcagctctgcggggcgcaggaggcggtgcacagcgccaagggttattcccattgtgttgatgtttatataaagcagtgcc

SEQ ID NO: 885183 - DNA, 99 bp, Homo sapiens
ctggattacacacagcaagttcctgcttctgggacagctctactgacgatgttaatgttcgtgtgtcaagtctcacactcttgggagctatagtgtcca

SEQ ID NO: 885184 - DNA, 99 bp, Homo sapiens
ggaacaccaggccaatgcatcccattcagcaaagtagagttccccatggtagaatgatttacggaaggctgcagtccttatctttgcaaataaacagga

SEQ ID NO: 885185 - DNA, 100 bp, Homo sapiens
ggacactctgaagattattgagcggctggaccacctggagaatgtcatcaagcagcacattcaaggttctgcttggattctgctagacagacccgacaaa

SEQ ID NO: 885186 - DNA, 75 bp, Homo sapiens
ccagaagccttacagaagttctatcgtggtgagttcagggaggtacgacttgggagaaatggggtggaagaaatc

SEQ ID NO: 885187 - DNA, 76 bp, Homo sapiens
atagacagaacgattgatgaagtagttgaatgggaagttattgctaattacatgaacatacattcttcctctggag

SEQ ID NO: 885188 - DNA, 98 bp, Homo sapiens
gaaaagaaaatccccgttgtttttcgattgcaagaggggagggatgctgtgcacactgtggaaggctatcattgactttcgaaacaaacagacttgac

SEQ ID NO: 885189 - DNA, 99 bp, Homo sapiens
ggtcatcgacagctgcaaggaggccgtcaccttcaaggccgtcagacaagttccaatgacaggatttacacagagagcaactattgatccagaactgaa

SEQ ID NO: 885190 - DNA, 99 bp, Homo sapiens
attccttgggcaatggtgaatttgaaaaggtggatgcccggagcataccagtgttagcaaaatggcaaaattcatatagcattaaagttgtacttcaag

SEQ ID NO: 885191 - DNA, 98 bp, Homo sapiens
caattccccattcctctcccctattgctggctctgcagggctctgatcaagcggatccaagccatgattcccaagctgctgtatgtttccaggaaact

SEQ ID NO: 885192 - DNA, 99 bp, Homo sapiens
aaacctgtgataacctgtctcaaaaccctcctcatcatctactccttcgtcttctgggtgttggtaaatcatgcttattgctacagtttacagacaaga

SEQ ID NO: 885193 - DNA, 76 bp, Homo sapiens
caagtacagttactctggggaggcttcagagaactttatctattcctgtgctggatgctgtgtagccacctatgtt

SEQ ID NO: 885194 - DNA, 100 bp, Homo sapiens
aactctgcaaagcctccagaggacataccacctccaggatcaggatgcagaggtccggaccctatttgtcagtggccttcctctggatatcaaacctcgg

SEQ ID NO: 885195 - DNA, 99 bp, Homo sapiens
atccaattcagctttttgtgctgccagcaagaaatgatcagtagcaccagtgtttatggcattaacagattatggaattgtgctgcttcttgatgctac

SEQ ID NO: 885196 - DNA, 98 bp, Homo sapiens
ggacctgcatgtgtgtgcgcgcgaaggagcggaagaatggcagtgctcaaactcaccgaccagccaataggagctctgaacccaaaaagagcagcatt

SEQ ID NO: 885197 - DNA, 100 bp, Homo sapiens
cctcttcctggccctgctcctggtggccgtggctgtgttggcctctctggctcgccaagaatattgggaatgcaggctttaatgagatcatggaatgttg

SEQ ID NO: 885198 - DNA, 76 bp, Homo sapiens
gacctcgatgaagtcaggataggtgttcttaaacacttgcatgattttctgaagctgtttgatgaagacaatccag

SEQ ID NO: 885199 - DNA, 76 bp, Homo sapiens
gatttcctggaagcagagaaatggtgtccctggccagtgtccttccacctgtccacaagcatggggaacatcttcg

SEQ ID NO: 885200 - DNA, 99 bp, Homo sapiens
ggatggcgtggagatatggcgcaactgcggcgcgctcttgcagccaatgccggaacaggatttgctgttgctgagcctcaaatcgcaatgttttgtggg

SEQ ID NO: 885201 - DNA, 98 bp, Homo sapiens
ttctaaatgtgcacccaatacctggggccacagcattaccactggttgtaagcctaccaggacatcctcggaaagtatttattctaggccaggctcca

SEQ ID NO: 885202 - DNA, 99 bp, Homo sapiens
agacctcaattctttggagaaaaatggatgaaggagtgagctgagtcgacagaaacttcatacccaagagctgctttctcagctggaaatggcaaatga

SEQ ID NO: 885203 - DNA, 99 bp, Homo sapiens
tctatttctctagctattgccttattttttctcatggatgttcttcttcgagtatttgtagaagggtcacccctcctaatttctcagtgtcacaagtgc

SEQ ID NO: 885204 - DNA, 98 bp, Homo sapiens
tgtgatcgattttaacaaagagaatattcactaccagaggaattttatggtcagatgtaccaacagtaccagcaacaggccggctatggtgcacagca

SEQ ID NO: 885205 - DNA, 98 bp, Homo sapiens
gaaggcgcgagtgaggaaaggaggtactgtaggctttacaggaagtatggtgctggcatctgcttggcttctagagagtcttacaatcgtggaggaag

SEQ ID NO: 885206 - DNA, 100 bp, Homo sapiens
cgccaacttcgtcctccggttgcgggggcggtgcgggcaaacctcgcgaggagaagaggacggccctgagcaagctgtcaaagctcgaaaaacagcagca

SEQ ID NO: 885207 - DNA, 100 bp, Homo sapiens
atgagtgctataagatgcgactgctacagggaccatgggacactattacgcaacagctgtcaaagctcgaaaaacagcagcagaggaaagaaaagaccag

SEQ ID NO: 885208 - DNA, 99 bp, Homo sapiens
agcagaacttggaccagacctacttggatgatgattacaggtccaccaggttgtggaaaaactcagttttgtataatgatgagcattttggctacatta

SEQ ID NO: 885209 - DNA, 98 bp, Homo sapiens
gcaacacgtgatgtgtctacttatcaggggtttggaaatcccttgtctccaggttgctgggattgacttcttgctcaattgaaacactcattcaatgg

SEQ ID NO: 885210 - DNA, 99 bp, Homo sapiens
ttgtaagtgcagatggaacacaacaggacgattactgagagccaatcagattagtttcaactgggacaggcttgctagctggatcaaccttactgagca

SEQ ID NO: 885211 - DNA, 98 bp, Homo sapiens
ttaccttcagaaggagacttccactttgcaggtggaacagaatggggactatggtaggggcagggatgatatcgctgatttagtagaagctaaaaagt

SEQ ID NO: 885212 - DNA, 99 bp, Homo sapiens
tgctgaatcatgagcccaatgtctccaaaaggatcccctaacaacagtgagagagcaatgcgagcagttggagaaatgtgtaaaggcccgggagcggct

SEQ ID NO: 885213 - DNA, 99 bp, Homo sapiens
aaactaggatatgctggaaatacagaaccacagtttatcatcccttcctttggaggtccccctccccactaagtgcctctttgcatagcaccagtcccc

SEQ ID NO: 885214 - DNA, 99 bp, Homo sapiens
aatgtcctaccttctctatcagatgctgtgtggaatcaagcaccttcattctgctggaattattcatcggaaatgaatactgcattgagggacggactt

SEQ ID NO: 885215 - DNA, 99 bp, Homo sapiens
cagagagccagagctctcccccacctgttattgatttgataacaataaagctgagtgaaatgcgactatacaggtaattgtcatgagaaaaccctggac

SEQ ID NO: 885216 - DNA, 98 bp, Homo sapiens
tacacctttgtgtccttcacacaggactgaaccatcaagacacctgaaaccttatcatgagcgaatgctgaggaagagattccgggaggatcccgagg

SEQ ID NO: 885217 - DNA, 100 bp, Homo sapiens
gaaagcccaaccttagctgcctcttcctaccacggtgatgttgttggccaggtctctacggatctgatagcccagagggcaattcaagctgctggaacaa

SEQ ID NO: 885218 - DNA, 99 bp, Homo sapiens
aaatacaggatgcctctcagctgccacctgcctttgacctttttgaagcctttgcaaaatcagctacggtgaagctatctaaaccggtggctctatgga

SEQ ID NO: 885219 - DNA, 99 bp, Homo sapiens
ctcgatccgcctgcctgcgcacctgccattatgccagtacatacaggcttctaaagccagggatggtgccagccctttcatttcaagtacgactgaagg

SEQ ID NO: 885220 - DNA, 98 bp, Homo sapiens
cgaagagttctacaacctggtgcgcttccggatcgggggcaagcggaaggtgatgcccaagatggaccagggggatatgagactttctactcggaata

SEQ ID NO: 885221 - DNA, 73 bp, Homo sapiens
ccaagcccaagatcaatgaggactggctgtgcaataagctgcgactttaggtggggtatattttcttctccta

SEQ ID NO: 885222 - DNA, 99 bp, Homo sapiens
ggaactcgtgaggagagcttggaaaccagaatccgggcaatggataaggatgccaagaaaagaatccataatttctctgtcatcaatcctgttcctgga

SEQ ID NO: 885223 - DNA, 99 bp, Homo sapiens
gcagctgcagccgcagccgcctccgaagatgggggatttctacgacccggagcacccgacccctgagcgatagatgatgaggaagatcgcttccatggt

SEQ ID NO: 885224 - DNA, 99 bp, Homo sapiens
tgcactgcatgtgagcctcacacctgccctgcagtggaggagtagatagtttacaggtggagcagttctggaggttttatagccacatggtacgtcctg

SEQ ID NO: 885225 - DNA, 73 bp, Homo sapiens
ggacaaggagttccagaatgtcatgacctacctcaccagcatccccaggtgtgaatcatggcaatacagtgaa

SEQ ID NO: 885226 - DNA, 98 bp, Homo sapiens
gcaggtcaaagctgaaaagtggaatcggagctgttgtattacctggggatgatgcccggcaattatttgttttagctggcagtgctgaagaaggagtc

SEQ ID NO: 885227 - DNA, 98 bp, Homo sapiens
gactggcggagcaccgccttccggcagaagctggtcagtcaaatgtatctgaggtcctgatttccggggagctacacatggaggacccagacaagcct

SEQ ID NO: 885228 - DNA, 99 bp, Homo sapiens
agaggatttgcttttgtaacttttgatgatcatgatacagttgataaaattgttgcactgaacctaccagatgtatttgggttggtcgtcctcccattg

SEQ ID NO: 885229 - DNA, 99 bp, Homo sapiens
gaaacgatggcgcgaggccgcagagctaaatgggggcctctccagggagtgctctgttcacggctccatcgctgttaaaagttcgtcgctgcttcctgt

SEQ ID NO: 885230 - DNA, 98 bp, Homo sapiens
ggcactccgccctagtttctaaggatcatgtctgcgagccaggattcccgtcaccttcaggccattcagaggaggaaagagaggggaatatgaagtca

SEQ ID NO: 885231 - DNA, 99 bp, Homo sapiens
cgagaaggagttgtttcccattgcagcccaggtggataaggaacatctcttcccagcggctcagattgttctctggggccggactgagaaatgcctgaa

SEQ ID NO: 885232 - DNA, 99 bp, Homo sapiens
tataaaaaggggacaatgactacaggacacaatgtggctgacctggtggtgatactcaagattctgccaacgtacactcgatggatccacccacattca

SEQ ID NO: 885233 - DNA, 98 bp, Homo sapiens
tggatggtatgggctgtctggagtttgatgaggagcgagcccaggaattgaaagatgttggccatcgtgatcagatggctgcagctagaggaatcctg

SEQ ID NO: 885234 - DNA, 98 bp, Homo sapiens
cgaggagtgtctgaaggactcgccccgcttcagaatgtatgacaacatgtccacaatggtgtacataaaggaagacaagttggagaagcttacacagg

SEQ ID NO: 885235 - DNA, 99 bp, Homo sapiens
ttcgttgccatgaggaaagaattctccgagatgctgagctttttataccaccaaagatcaacagaagaacccagtggaagctgagcctgctagactgag

SEQ ID NO: 885236 - DNA, 99 bp, Homo sapiens
ttaatggtatggagcatgacctgatgcagagacggctcagaagagtcagctgcaccactgcgatccctacggagacatggaaatttacactacagaagg

SEQ ID NO: 885237 - DNA, 76 bp, Homo sapiens
cggccccgcagcagctccaagaaggaaccaagagaccgaggccttcatttctggcctgctggacaagatccggggc

SEQ ID NO: 885238 - DNA, 99 bp, Homo sapiens
cctgaactcttcagataatcagagtggaggaagtacagccagcactgaagtcctgagcgaggagcccattttgaagtggtataaagatgcacatgttgc

SEQ ID NO: 885239 - DNA, 100 bp, Homo sapiens
aggacaaacagtgcttccttctctctggtaatgcccaggaaaccagaaaggatgggtttccagatttccaggattctgtgcaaacactcttccagcaggc

SEQ ID NO: 885240 - DNA, 98 bp, Homo sapiens
caagcccacggggagcagagcagcaactcacccagcacacaaaatggatctcttacggagaaatccagcggtcgcaccgcccattacaagttgacctc

SEQ ID NO: 885241 - DNA, 76 bp, Homo sapiens
agaactcgagcgacagagacaagctgagcttgccgcacaaaaagctagagagcctcctgcctgccctatgtcccag

SEQ ID NO: 885242 - DNA, 98 bp, Homo sapiens
tgggctgaaggaatgctggcagacaaaataggaatatttccaatttcatatgttgagtgctcaacaggaaccttggattatattttacaacgctgtca

SEQ ID NO: 885243 - DNA, 99 bp, Homo sapiens
taacagcagcgccgtcccgtccgacagccaggcccgggagaatgatcaccagcagcttgcaaaacttatccaggagtcgccaaccgttgaactgaaaga

SEQ ID NO: 885244 - DNA, 99 bp, Homo sapiens
gagcaaacagattcagtggcctgcattggtgaaaggtgtagcagtcactcggcctacacccacagcatcgaccttgtgaacccagcgacctgactgcct

SEQ ID NO: 885245 - DNA, 98 bp, Homo sapiens
agagcaggcaccgtagccccagtgccctgtacaaccctggtgaagatctttaagcaagaagttaaagagtgaacatggtggaaaaaatataattattt

SEQ ID NO: 885246 - DNA, 99 bp, Homo sapiens
ttccctgggcgagagatcatccagcccaccgtagtggatcccgtcagcttcatgttctggaagtcccaagaggaattacaagagtactgcagacatcat

SEQ ID NO: 885247 - DNA, 98 bp, Homo sapiens
agccaacccaaattaccttaattgtaagaagacaagaggtttcttctcctagaaaagaaacttcagcaaggagtcttggcagtcctttgctccatgaa

SEQ ID NO: 885248 - DNA, 98 bp, Homo sapiens
accaaaagaggaagatagtcttgggacccttgcatggtgtttcaaagggtggtgaagaactaaggtagtcttggagagcccgtggcctagcagtaccc

SEQ ID NO: 885249 - DNA, 76 bp, Homo sapiens
ccttgacgatctggacgccgatgccgatgatggctgggcagatttggagtccaggaatgagactaagcatttatct

SEQ ID NO: 885250 - DNA, 99 bp, Homo sapiens
ccctctgaaggccgccagcccagccccagccccagccctacagagggtccgcaagcaggtggtgaacatcccgtccttcattgtccgcctggattccca

SEQ ID NO: 885251 - DNA, 99 bp, Homo sapiens
tggctcccttctgccccagctccgtctcggcggcggcgggtgacagatcagtcagtgaaagcatttgctgaacactgtcctgagcttcaatatgtaggc

SEQ ID NO: 885252 - DNA, 99 bp, Homo sapiens
ggatacagctggacaagaagattatgacagattacgccccctatcctatccgcaaacagagccagtctacttgatgacttatacaagtatttcttcttc

SEQ ID NO: 885253 - DNA, 98 bp, Homo sapiens
gaaaccatggaggagcactgcaagcttgagcaccagcaggaaaatcgtgaagtcgatagaaatgaaggcctgaaatttgcacgaaagcattccatgtt

SEQ ID NO: 885254 - DNA, 98 bp, Homo sapiens
ttcacggggctggctgctctgtgtctcttccaagcggccctccaggcactgaagcgtaagaagaggtatgagaagcagctggcgcagatcgacggcac

SEQ ID NO: 885255 - DNA, 99 bp, Homo sapiens
ctgctgtgacatgtctgttagggaggcactcaagatgaaaactacttcaactaaaagccaaccacttgaacaaggaactgcaagcacatgttgaccaga

SEQ ID NO: 885256 - DNA, 99 bp, Homo sapiens
attccctgaggaaggagacataatggttactgtgtcttctgaagaaaatgtgtgtgacatagcccacacaagatgtgatcagctatccattgttactga

SEQ ID NO: 885257 - DNA, 98 bp, Homo sapiens
agcactggggcctggaccagcctcttctgaaacactgggcttttcctccgcaaccatgtctgacaaacccgatatggctgagatcgagaaattcgata

SEQ ID NO: 885258 - DNA, 99 bp, Homo sapiens
tcagttttgaaggagaggggtcttaagaagattagattgggaatagaagatttccacatggaagaggcactggattggcctggagtatacttgttacca

SEQ ID NO: 885259 - DNA, 98 bp, Homo sapiens
gggccttacggacttgtcggtgtaccaggatgcagtggttctaaggtcacgagacatgtgtagaactgcttttagaacaggaagttttccagaaaacg

SEQ ID NO: 885260 - DNA, 99 bp, Homo sapiens
ttctgcctcgggccctgcccctacatttggagcctggacacgcagtacagcaaggcctaccctctgaagaggtccaagcaacggaagtactactacgaa

SEQ ID NO: 885261 - DNA, 99 bp, Homo sapiens
agcctcggtgctgcacaacctcaaggagcgttactactcagggctcatctacgtggtgtgtgccaggtgctccgactaccgggccgaactgaaatacga

SEQ ID NO: 885262 - DNA, 99 bp, Homo sapiens
ttctagctactgcacgtacttcataaagcaggactctaaaagctttgggtgtatggttgaagcctggaattttttgcggcaacattgcaataggttgaa

SEQ ID NO: 885263 - DNA, 76 bp, Homo sapiens
tccagaggatcgctgcaaatctccaacctctggtgaccaagaatatggcccaggtgaccaaagccctggacaaggc

SEQ ID NO: 885264 - DNA, 98 bp, Homo sapiens
gagagcctcccaggtcccagcagagctgctgctgagtcatgtgctgttcctggggcttggatgatgtaggggaagcaaggtgaaagtggtatcccgtg

SEQ ID NO: 885265 - DNA, 76 bp, Homo sapiens
ctgaaaatggagaagtctattttatagagcgatatgagtctcatccagtctgtgctgatctgcaggccaaaattct

SEQ ID NO: 885266 - DNA, 98 bp, Homo sapiens
aggattgagaggcccccagcctcttaaggttcaccggaacagcacaatccgccctggctgtgatgtgaatccctcctgcgcactgtgtggttcaggca

SEQ ID NO: 885267 - DNA, 76 bp, Homo sapiens
gttgctgcagcagcaggaggaggaccgcagcaaggtggcatggaatattcacatgggagagccgcatgaggccgcc

SEQ ID NO: 885268 - DNA, 100 bp, Homo sapiens
ccgacaggcagacggactcggtattggagctgaaggcggcggcagagaacttgccggtgccagctgagaatcatctcccctgccccacaaacatgaaaga

SEQ ID NO: 885269 - DNA, 75 bp, Homo sapiens
ctggcaatacaaactttctgctttcagtttggacatatttgactcttttccccccaggttgaattgaccaaagca

SEQ ID NO: 885270 - DNA, 99 bp, Homo sapiens
ctctacatgcgctctttgaaagcgccccggaatgacctgtcgcctgccagctctgcctccttttctgaaagagttcggaacatgtcgcctgatgaaatc

SEQ ID NO: 885271 - DNA, 98 bp, Homo sapiens
ccgaactggaatctggatgagcagctcaagcagataccatgtttgtgtggaagtgccccgtgtttgctatgccgatgctgtcctagtggaaacaactc

SEQ ID NO: 885272 - DNA, 100 bp, Homo sapiens
gtttacttcaagagctgagggcaaagcagcctgacctagctcctggactgaccactattggagcctgtgagcgagtgctgtgctttcatgggcctcttct

SEQ ID NO: 885273 - DNA, 100 bp, Homo sapiens
agaaaagaggcattttccccaaagtagcaacaaatatcatgagagcatggctcttccagcatctcacagaccttttttctatcagtgcttatgtttatgc

SEQ ID NO: 885274 - DNA, 98 bp, Homo sapiens
gaacaccgtcacgctgctggaggaggagagcgaagaggaactttactcctcctgtcgccagctgaggaggcggcaagaagaactgaacaaccagctct

SEQ ID NO: 885275 - DNA, 99 bp, Homo sapiens
gctgttgaaggcgtgatgagagtcattggggttcacgagctcatgaagctgtgctgggcccctagcccacaggaccggccatcattcagcgccctgggc

SEQ ID NO: 885276 - DNA, 98 bp, Homo sapiens
taaaactgaaggagaagcccatgaagagatggtggattctcactgagttttgactagcggaagaaaagtgtgagccactgccccatgttgtgttgatg

SEQ ID NO: 885277 - DNA, 99 bp, Homo sapiens
aagtccactctggccaacatctttgcaggtgtgcatgacagcatggacagcgactgcgaggtgctgggagtggtggtgctagagaatgaattgatgtat

SEQ ID NO: 885278 - DNA, 99 bp, Homo sapiens
ttatcaagacttttttgaagccatccgcagaaggggagacacattttatgttgtgtcatttcgaagggccttgaaccggggcattgctgctgtcaagga

SEQ ID NO: 885279 - DNA, 75 bp, Homo sapiens
cagaattggtgggtctcactgacttcaagaatgaagccgcggaccctcctgctgtccaacaccaggatgtgatgg

SEQ ID NO: 885280 - DNA, 98 bp, Homo sapiens
cgcgctcgcctccctcggctcggcccaaagcagcagcttcagccccgaagatctatcttgggatcccatggctttctttactgggctctggggcccct

SEQ ID NO: 885281 - DNA, 99 bp, Homo sapiens
tcctcccagcagctcatgcaacatctcctctggggaaatgcagaaggtgcccctgggcgctgggattgctctagcctgtaagtataatggaaaagatga

SEQ ID NO: 885282 - DNA, 99 bp, Homo sapiens
ccatcacgaccctgacctcagagcagatccagaagctcttagccagcactcgctatccacctccagataacaatgaagatggtgccaaaactgctttct

SEQ ID NO: 885283 - DNA, 99 bp, Homo sapiens
caccagcaagaagtcagccaagagatgtgttaaagaaggacaggtggagggaagcgccccagacaaggaagctggcaaccagccccagagcagcgatgg

SEQ ID NO: 885284 - DNA, 98 bp, Homo sapiens
ccgccgccgccttgctgctgctcaaagctgctgccgccccttgggctaaaagcctagaacattccatattctgcttcacacacggtgactcactcact

SEQ ID NO: 885285 - DNA, 98 bp, Homo sapiens
gggatttcaacctgaaagtggaggctgcgaaaataggacacttggtggggttcccacacaagctcctccacctcttgaagcaacttcatcatcacaaa

SEQ ID NO: 885286 - DNA, 76 bp, Homo sapiens
tgacaccagaagagagcaaggaaaggcttggggtgataaaagaaaatgtggctgaagttacccgaagttcagcttg

SEQ ID NO: 885287 - DNA, 98 bp, Homo sapiens
gattctgctcgtgttccaaatcatcgcctttctggtgggaggcttgattgatgatagtatttctgctgcaagtacttctgatgttcaagatcgcctgt

SEQ ID NO: 885288 - DNA, 99 bp, Homo sapiens
tgagatttcatgaagatggcgccaggacgaaggccctactgggcaaggtgtcgtgaaaactacccctaaaagccaaaatgggaaaggaaaagactcata

SEQ ID NO: 885289 - DNA, 98 bp, Homo sapiens
aactgttccgtgagctgatgcaccagaaagctgaaaaggacataagcagctctatgaccaatagcacagctgccagtagacccccggtcaccctgagg

SEQ ID NO: 885290 - DNA, 98 bp, Homo sapiens
tctctgaagccgtgcccgttcttcctggagggaaagtgccgctttaaggagaactgcaggtgttggagcgggccggagagaagtagagtgggctgcga

SEQ ID NO: 885291 - DNA, 99 bp, Homo sapiens
gtcatacctactgccatagacccaagattacaacaatcccagatggagactggttttgtccagcttgcattgctaaggggcttacggtgagacatatcc

SEQ ID NO: 885292 - DNA, 100 bp, Homo sapiens
gcacaatattaaaactttacctgggatctcagaaaactgatcttcacaatgaaggctacatcttggaattagattgctgttcctccttagaccacccgac

SEQ ID NO: 885293 - DNA, 76 bp, Homo sapiens
ccatcagctcggcagtcgcgaagcagcaaccatgggattatcttgaacacataacctccattggccccaggactac

SEQ ID NO: 885294 - DNA, 98 bp, Homo sapiens
gacaaccaggcaatgctggatagataccgaattcttatcacaaagaacccttaggagaaatcttgagagtggacagcaattgtgaagatcgccagaga

SEQ ID NO: 885295 - DNA, 99 bp, Homo sapiens
ggagaatggagcacatactatagcaaggagtacacctttaggatgctataaaaaactaatagaatatcataagaatggacacctttcttttaaatatgt

SEQ ID NO: 885296 - DNA, 99 bp, Homo sapiens
atctccacagcacctcccaggcgctcgatgccagccgtcatcggtttccagacagctgccaagtatcttcaagaccttctcatggagagtgtgaatttt

SEQ ID NO: 885297 - DNA, 75 bp, Homo sapiens
ccgggtccgcgcggacctcgcccagctcagaaccagaggcaggagaagtgtcccctccagtcggtgcgggtgtca

SEQ ID NO: 885298 - DNA, 99 bp, Homo sapiens
ggctttagtggcagcatgaagcgcaccccgactgccgaggaacgagagcgcgaagctaagttttcggctttgtgagaaaccttaccatcaaacacgatg

SEQ ID NO: 885299 - DNA, 100 bp, Homo sapiens
taacctcttggcttctgaggcatctgacaagtttgaaaaagtaccagaaggtcctatccctccatctacaccaaagtttgcatatggaaaggtcactttg

SEQ ID NO: 885300 - DNA, 99 bp, Homo sapiens
ttacatttatttatggttttatgtttgacactttttctcaacaacataattaagggacttcatctgcagcatcctcaccattaaaaaaagaacagccct

SEQ ID NO: 885301 - DNA, 99 bp, Homo sapiens
cacggcatccctgacgagacctgcaacaactaccaggccaaggaccagggagcacggtctgaatctgcacagagcaagatgctgagtggagtcgggggc

SEQ ID NO: 885302 - DNA, 76 bp, Homo sapiens
caggcgactgcctcatcttcaagctctggtagctgaagaacatctcacagtggacgccagggtctattcctacgct

SEQ ID NO: 885303 - DNA, 100 bp, Homo sapiens
ccgttcagcacaccagtggggcagtgcctcggaatacaaacagaagcttgcacgagtaacccaggtccgcaaggaactgaaatcccatattcagagcttg

SEQ ID NO: 885304 - DNA, 98 bp, Homo sapiens
ccgggggcgcagggaaggagggcgtccgagtcaacaaccgcttcgagctgtgatgaccagatcctggaatggtgtggggaggacgccatccactacct

SEQ ID NO: 885305 - DNA, 76 bp, Homo sapiens
cctgcctcagcctccagagtagctgggattacaggtgtgacaggatacctgaaaattgatagcagtggcgatcggg

SEQ ID NO: 885306 - DNA, 98 bp, Homo sapiens
gaagaaaatgcaaaaaaactaatggaattagcctgcaacatgaaggtattattctcactaaggttggttactatactattccatctatggatgacctt

SEQ ID NO: 885307 - DNA, 98 bp, Homo sapiens
atcgagtctctgcgaacattccttttaacctatgtcttacaaaggcccaaagacagggtctcactgcattgcctagtctggtcacggactcctggcct

SEQ ID NO: 885308 - DNA, 98 bp, Homo sapiens
aagacttcaagaaaaccttagaagagaagcatttagagagcatcagcaatagtgacagagctgaatgaacctctctccaatgaagatcgaaatctcct

SEQ ID NO: 885309 - DNA, 100 bp, Homo sapiens
ccctgggccagaggcagaaaacggacggaagaaaaggtctggccgctctttcgacgtgtagcagcagctttgccgggaatggaaagcacacaggacagaa

SEQ ID NO: 885310 - DNA, 75 bp, Homo sapiens
cagggaccttgtggatgatatcttcactgtcacagaggatgaaattaaggttttccgaaattctctgtatgcacc

SEQ ID NO: 885311 - DNA, 99 bp, Homo sapiens
ctcaggacccctgctacgtggagaaaacctcggataagttgtgattccaaagaatccctatcctgcctccgatgtgaatactgagaagcccagcatcca

SEQ ID NO: 885312 - DNA, 99 bp, Homo sapiens
tccaaggagagcttaaaattgctgttttacagaagcttgccagcaaagcacggacagagaaggaggagaagctgagccaggcctatgcaatcagtgctg

SEQ ID NO: 885313 - DNA, 99 bp, Homo sapiens
ctgaagaagtgcaagagcagaggccttctctagaccttgccaagatggcacaggaattaagtagactggctggacagattcgaaggttgtatggttcaa

SEQ ID NO: 885314 - DNA, 99 bp, Homo sapiens
ggaaaacgtggagaagagaattctgtgccacatgcagctcagttctgcacaggtgtttgatatacagaggaaagtcacctataggaacctgagcacctg

SEQ ID NO: 885315 - DNA, 99 bp, Homo sapiens
ataagtcgaaggggaaggcgcctgaagaggacgaagttaagtgggcagaccaacatccacctcagcaaaaacttcttcctgacgaatcgcgccagggag

SEQ ID NO: 885316 - DNA, 99 bp, Homo sapiens
catcatcctgacagctgtgtactttgccctcagcatctcccttcatgtctgggtcatggttgatgccgccttacctttggacatcctaacctatgaaga

SEQ ID NO: 885317 - DNA, 75 bp, Homo sapiens
tttgacctcttcgatgtgcgagactttggaaagttcctgggcttcccgatggactcgagtttttactatgtgagc

SEQ ID NO: 885318 - DNA, 76 bp, Homo sapiens
cacacgactagaaggacgactgcctggcgcgatacaaaaatccaaaacagagtggagtacgagaaaagggtccgag

SEQ ID NO: 885319 - DNA, 100 bp, Homo sapiens
aaggctggtgctgccagatggacaaggagaccaaagagaacaacctctctgaagaaggtataagtgtgctagcggagtgtctagattgtcctgaattgaa

SEQ ID NO: 885320 - DNA, 98 bp, Homo sapiens
ggggacaaaggcgcaagtcgagaggaaactgttgtgcctcttcatattggcgatcctgttgtatgtagccatagctgtaacgtataaccatgatgggt

SEQ ID NO: 885321 - DNA, 99 bp, Homo sapiens
actatcaaatttcgacactgttctctgttaagaaatcgacgctgcactgtagcatacctgtggacccaagtggagagattgtggaactggcgaaaggtg

SEQ ID NO: 885322 - DNA, 76 bp, Homo sapiens
aacctgtgcctccagacactgctccctgtgaaattctgaagctcaacagacagtcagctaaaactgtggaatgtag

SEQ ID NO: 885323 - DNA, 99 bp, Homo sapiens
accccgccagctccagagccacgtacgaaggtcagtgcaccagatattctgaaacctctcaatcaagaggatcccaaatgctctactaaccctattttg

SEQ ID NO: 885324 - DNA, 76 bp, Homo sapiens
acggtgctgggagcgcgtctccttgaacgttgtcccgcctgggattgcgagttgtattccctgaatgactataaac

SEQ ID NO: 885325 - DNA, 98 bp, Homo sapiens
tggcttccgtgcccgctggcattgctaaacacgtggaaagaatcaatttggggttcctacttcagtctctggaagatttggacacaagtttaaggaaa

SEQ ID NO: 885326 - DNA, 76 bp, Homo sapiens
atggagactgtcttacgctgacaaagattattgaagcaagactaaagtagagacggggtttcaccgtgttagccag

SEQ ID NO: 885327 - DNA, 98 bp, Homo sapiens
acgaatctgcccacccctcctgtaacccagcctgtttcacttcttggtattttgaaggtggcgtctcatctgtctacctctgggatctggatcatggc

SEQ ID NO: 885328 - DNA, 98 bp, Homo sapiens
tgcccggacggtgttggttgggaggacagttatgggatggatgggaaggttaatcagccccgtctcactgcagacatcaactggcaaggcctagagga

SEQ ID NO: 885329 - DNA, 99 bp, Homo sapiens
cccaggaggaagcaggagcagcccaagcgccttccctcactgactgcagcagcagcggcagcgcctcggttcctgagcccaccgcaggctgaaggcatt

SEQ ID NO: 885330 - DNA, 100 bp, Homo sapiens
tatgacatgagggaaggcaagcagatcagcctgcctagggtagttaaaagacgagtgaatgctctcaaaaacctgcaagttaaatgtgcacagatagaag

SEQ ID NO: 885331 - DNA, 98 bp, Homo sapiens
tagccttagtaataaccctcttttccagtataagtatttggctcttaatatgcattatgtaggtgtccttgaatggccattttggacaaaactggttg

SEQ ID NO: 885332 - DNA, 99 bp, Homo sapiens
agataggaggtccaaaagaagaacttattccagagaaactggccaagaaggttcctgttgtaaaagaagatgatgaaccagaggaagaagatgaagaag

SEQ ID NO: 885333 - DNA, 98 bp, Homo sapiens
caagcacaagtatcagagtcgggagagctttctggatgatgtaaaccttattctggccaacagtgttaagtataatgatgatagtgtcgaaccaagtg

SEQ ID NO: 885334 - DNA, 98 bp, Homo sapiens
ggaaacacgctggcaagcaagattataatcaggaagtggatgcctccatttttaaggacatggatttgattgacatactttggaggcaagatatagat

SEQ ID NO: 885335 - DNA, 75 bp, Homo sapiens
cacagaagctctcttctcaacagccatgtgaccaagaatatggcccaggtgaccaaagccctggacaaggccctg

SEQ ID NO: 885336 - DNA, 76 bp, Homo sapiens
attttctctaacaattacaaaggtggaactccagggaagataaagtcagacctaaagccaaaaggaaagaagaacc

SEQ ID NO: 885337 - DNA, 100 bp, Homo sapiens
actggatgcagcaaggaaataggatttaaccgctctctgcctcccagtggtgtattgtttgtaacaaagggaacatttggacaactcacgtgtgagtggc

SEQ ID NO: 885338 - DNA, 99 bp, Homo sapiens
gagaaggaaagcaccatgacgtccatccatttcgtggttcacccgctgccgggcaccgaggaccagctcaatgacagatagttttgaggcagctgtgcc

SEQ ID NO: 885339 - DNA, 99 bp, Homo sapiens
ctgccagagagacagaagtacgaaatgctgtgccgtggggagggtatcaaaatggatttacttaaatccattgtttcaagaatgaaaaaggcagtagaa

SEQ ID NO: 885340 - DNA, 75 bp, Homo sapiens
atcaatgcacagttagacctctgtgaggatgaagatgtatcttacttcagttccaagaaaagatgtccatgaaat

SEQ ID NO: 885341 - DNA, 76 bp, Homo sapiens
atgaggaaactgaagtttggagcgatcacatcattttcccaagtttcatagagtaatagcaatgaacactccaaag

SEQ ID NO: 885342 - DNA, 76 bp, Homo sapiens
cgacagcttcggggaactgattccgcagccttccaatgaagctactcccgagcccggagaggacccacgcgtgacc

SEQ ID NO: 885343 - DNA, 99 bp, Homo sapiens
caacagcagcaactgccgcacccttgaaaggaggcccctgccgtgtggacccgtaaaataaaatggccctacctgaacccatccttccatccctccaaa

SEQ ID NO: 885344 - DNA, 98 bp, Homo sapiens
tcaccttcaacaaccccaccacggagttccggtacaagctcctgcgggccggcggggggtgagcccctccagactccgaataggagatcaagagtttg

SEQ ID NO: 885345 - DNA, 99 bp, Homo sapiens
ccacagaaacccggactgagaggcagcgagaggatgatcccagactttaaacagcaaatttcagaattggagaaacagaagcaagatcttgaaatccgc

SEQ ID NO: 885346 - DNA, 99 bp, Homo sapiens
tgactgagagccagtggatttgccagcagtctggattgccaaggatccaagatttgaacgattaccatgtacacacaaaggaacctatgcagatgactg

SEQ ID NO: 885347 - DNA, 99 bp, Homo sapiens
caaaatggggatctccacagtcatccttgaaatgtgtcttttatggggacaagttctatctacagtgtggacgaatgtggaacctcgctctgtggctgt

SEQ ID NO: 885348 - DNA, 99 bp, Homo sapiens
ggtagcccttgctcaacagaagatttgctctatgatcgtgataaaggatgtacagttacccagcacgtgtacctcctcctcctcctattgctcgggctg

SEQ ID NO: 885349 - DNA, 99 bp, Homo sapiens
acctcggcacgcagcggagatgcctctttttgccaccaatcccttcgatcaggatgttggtgtggctggatctcctaaaacccattgtgaaacagatta

SEQ ID NO: 885350 - DNA, 100 bp, Homo sapiens
gctggaactgcatttcttgccctagtgacttaactgccgaaggaaaatgtcactgtcccattggccatattttaggtataagtgtgctagcggagtgtct

SEQ ID NO: 885351 - DNA, 99 bp, Homo sapiens
tcggcttcttctccaatgtgtcatctgctttcgaaaaatgtcacccttggacaagggctgttttgctgcagcttctgaagtgttaaagcacttgaagga

SEQ ID NO: 885352 - DNA, 98 bp, Homo sapiens
gtgaatctcaggagagagcagccagagtgagcttcttcgagacaccttcacttccctgggctatgaagtccagaaattcttgcatctcagtatgcatg

SEQ ID NO: 885353 - DNA, 98 bp, Homo sapiens
ggaaatggctgccgaaaacaagccggaaggtgttgctggaagaagccaaggatttgctctctgactggctggattctacacttggctgtgatgtcact

SEQ ID NO: 885354 - DNA, 100 bp, Homo sapiens
ggcttttctatttcgttttaactgttggcgaaaattatttgggaagagagaagggcacagttacctaagtatcaacgtaatcttcctcggccaggacagg

SEQ ID NO: 885355 - DNA, 75 bp, Homo sapiens
tcccattttgctcagcgactgtttgatgacgtcccgcaggatggaggaaccaggggacgccgctgtgccattgaa

SEQ ID NO: 885356 - DNA, 99 bp, Homo sapiens
cccggaagattgcaaaggcttttgccatctctggtccattcaacgtccaatttcttgtcaaaggaaatgatgtcttggaactagcttctaaaaaatccc

SEQ ID NO: 885357 - DNA, 99 bp, Homo sapiens
agaagattatgatactcttgcttatttattggcttaaggattaaggatccccaaagtctcagacttcactctgctgtgtgcgtgcaccagctgcctcca

SEQ ID NO: 885358 - DNA, 99 bp, Homo sapiens
aacaaggcccggacaatcctgcagcacctcagtgaagcctggcgctgctggaaagccaacattccctggaagctgcaaaggaaaagccaagtgagacgg

SEQ ID NO: 885359 - DNA, 98 bp, Homo sapiens
ctgatggcccgcagcttcggtgacaaggttttcctttggaatatggataaatacaccatgatacggaaactagaaggacatcaccatgatgtggtagc

SEQ ID NO: 885360 - DNA, 100 bp, Homo sapiens
ctttcggcttctgagacggcggcagcagcggcattcaggtttcagactaaatatttccaggggaaatacggtgatttagacagctctctcatctcctttg

SEQ ID NO: 885361 - DNA, 100 bp, Homo sapiens
cccgcgccccctctcgctctgcctctccctctgcctctgcctctgcctggccgcggctctgggaagtgcgcagtccgcctgcagactgcagagccttaat

SEQ ID NO: 885362 - DNA, 99 bp, Homo sapiens
tttccactggagttgcttcacttagctctacaatcaacccatgtgagctccctctttgcccactagcagggcattagctggtgctgaagacagtggctg

SEQ ID NO: 885363 - DNA, 75 bp, Homo sapiens
aacctcaatcatggccataccgagcaggcgataggaagaactatgcctctgccaagctttctgagttgctgccag

SEQ ID NO: 885364 - DNA, 99 bp, Homo sapiens
tggccctctgtctgcctgtgtccctgaccatggctccctgcagtaccctttaacggcaacgtgttggaccttccggagcttctcagaagacagagggtt

SEQ ID NO: 885365 - DNA, 99 bp, Homo sapiens
ggatggcgtgcagcgcaaccacgagacggccttccaaggtaggtgcacgtctcatcgcacatgctggcagcctcaccaacctggccaagtatccagcat

SEQ ID NO: 885366 - DNA, 99 bp, Homo sapiens
ctttttctgctctgagccggacgccggaatggagtttgaggaagaggctgtcacccttgacccaaactttctggatgcttatatcaatttaggaaatgt

SEQ ID NO: 885367 - DNA, 99 bp, Homo sapiens
agtgacatcgaatgtgtccacaaagaatcaggagccagatgaccaagatgctccagatgaacatgagtcgcctccacctgaagatgccccattgtaccc

SEQ ID NO: 885368 - DNA, 99 bp, Homo sapiens
catgtgcagcagcggtgtgcatcggttacctacctgggcaaagtctccaccactggcatgcagtttttgtcaggctgcacagaaaagccagtcattgag

SEQ ID NO: 885369 - DNA, 98 bp, Homo sapiens
ttggagatcaccagccgacctcagccatccagctcagcaatgcggttccagttccaggatgtcactgtacactgaggaggggacggctccgtcttcac

SEQ ID NO: 885370 - DNA, 76 bp, Homo sapiens
aactgcgcatctttgagcagtacaccatcgaggaaaccactgattgcttgtgtggagaaacagctattaggagaac

SEQ ID NO: 885371 - DNA, 99 bp, Homo sapiens
ggcgacgacatgtatgggccagaaaaggagtccttcaataatgttaaacagtggctgcaggaaatagatcgttatgccagtgaaaatgtcaacaaattg

SEQ ID NO: 885372 - DNA, 98 bp, Homo sapiens
acaagacgactcaataggaggaagatcaacctctccacttctcctacacctgcacagttaataagccgttcccaggcttccagttctaccagcggcag

SEQ ID NO: 885373 - DNA, 98 bp, Homo sapiens
aagtgctggccagtgagcccatcccgttctctgatttgcagcaggtgtttgtgctctgccaaggcctcctgcagctctgccaactcctgtacagcgcc

SEQ ID NO: 885374 - DNA, 99 bp, Homo sapiens
gaaaaaatctgaaagtgataaaataatatgggaaaaacatcaaattcttgaccaatctaggtttgcagaatttgatcagatcatgaagtctgaccctga

SEQ ID NO: 885375 - DNA, 98 bp, Homo sapiens
taacttgtcttccactaaagagttggacctgtcagaccactaaggcttttcttcctacgatgctggagattaatcatggtcatattgtgacagttgca

SEQ ID NO: 885376 - DNA, 76 bp, Homo sapiens
ccggaggtgacaacaataacaagactgtccttcggacaagttttagaatgtttggaatggttttggaaaaaattat

SEQ ID NO: 885377 - DNA, 99 bp, Homo sapiens
ggcagcccacccctcccactggggactctgtcccatcacaggtaaagtcagtgataaatcttttgtttgctgcatatactggagatgtgtctgcacttc

SEQ ID NO: 885378 - DNA, 98 bp, Homo sapiens
cgtggtcagccgcttcgacgagcaggaagccttatcagttgtgagtgaggaccagtcgttgtttgagtgtgcctacggaacgccacacctggctaaga

SEQ ID NO: 885379 - DNA, 98 bp, Homo sapiens
ggccgggccctcgagacggggacgatgaagactggcccatttgcagagcactccaaccagctgtggaacatcagcgccgtcccttcctggtccaaagt

SEQ ID NO: 885380 - DNA, 75 bp, Homo sapiens
cagggatgcgctgagcgatttcttcgaggtggagtcggagctgggacgatactgtgttgacaagtggtcatgcta

SEQ ID NO: 885381 - DNA, 99 bp, Homo sapiens
gggagcctcgtggctgcgtcaccgccgcccccccagacaagatggacaccgcggaggaaggtgctgaccttaaggaaagagccaaaatgagttccagtg

SEQ ID NO: 885382 - DNA, 98 bp, Homo sapiens
aggtggcaagatgagacgagaaagaacacgctttgttgcttctaaacctctggaggaggaggcaattcgaagttttcaagtagcccttcacatctatc

SEQ ID NO: 885383 - DNA, 76 bp, Homo sapiens
ttgaataccaggagaagccgctactgagggccctgctggacatcatcagctccggaccaaaatttaacagtgccat

SEQ ID NO: 885384 - DNA, 76 bp, Homo sapiens
ccctaaaaatcatcccagccacccaggaggaagatcgcttaaaggagagcaagcaagaatttcgactgggagtgcg

SEQ ID NO: 885385 - DNA, 98 bp, Homo sapiens
aacagtgaagatgcaattgaaattacaagcgaagaccgttttatacaggagttctctgcttgtatgcaagccagtcctgtccattttcctaatggaag

SEQ ID NO: 885386 - DNA, 74 bp, Homo sapiens
gtttgtggagttcctcaaacgaaaagagaattgtacactgcaggctactccagagcaaataagcatggacctca

SEQ ID NO: 885387 - DNA, 100 bp, Homo sapiens
atcttcccccaccacttctgttcctgctgtttcatctcctcctatgggcagtctgtacaacccaccctacagtgctcagtcacaccctgctgcaaagacc

SEQ ID NO: 885388 - DNA, 98 bp, Homo sapiens
ggaggtacagtgtgcatcctacaacaacaagccattcatgggccggttttatgagtgggaaccatttgcagaagatctatccatactaatggaaatgt

SEQ ID NO: 885389 - DNA, 76 bp, Homo sapiens
ccgctgcccgccaggccccgggggcggcggccaagatgtccgtgcctgaatactcccccagttgcaagaggcgcag

SEQ ID NO: 885390 - DNA, 99 bp, Homo sapiens
ggcagaggatccagtgttcaccatcctggccccggaaggtcctgaacgaggctgtgggggccctgatgtaccacaccatcactctcaccagggaggacc

SEQ ID NO: 885391 - DNA, 98 bp, Homo sapiens
cagacggattcatttagagctgcggaacaggacgccctctgatgatccctgctgccttggtgatcccgggctgacagccagagagcacagcggctcag

SEQ ID NO: 885392 - DNA, 99 bp, Homo sapiens
ataaaaggaagagctatcaaggagtaccaatcaggtcggggcactcaggtgtttgttactgactattcagactatgaagacagttccctcgaatttttg

SEQ ID NO: 885393 - DNA, 99 bp, Homo sapiens
ccggccggtgccagcacctttcggcttctgagacggcggcagcagcggcattcaggtctctgagcggcccctgatgttcctgttggacactcctggcgt

SEQ ID NO: 885394 - DNA, 100 bp, Homo sapiens
aacctgggcaacagctgctatctcagctctgtcatgcaggccatcttcagcatcccagaattccagagagcggaaggccatggtaaaatttcagtatttg

SEQ ID NO: 885395 - DNA, 100 bp, Homo sapiens
gcggatccctgagctcgtcaagcagctgtcggccaagctcatcgccaacggtgaatggaagagaatccgaagaagaaaatctcaataaatctgaaataag

SEQ ID NO: 885396 - DNA, 75 bp, Homo sapiens
cttatcagccatccttcgctgcagggcaccccggctctgccccagactggcataccaacagaggctttggtgaag

SEQ ID NO: 885397 - DNA, 75 bp, Homo sapiens
tgaaactcttggaggaagcaaccatttcagtctgcaggtcattaggttgctgcttttgctcagaggacatccatg

SEQ ID NO: 885398 - DNA, 100 bp, Homo sapiens
cgaagcacgagcagatcctggtcctcgatccgcccacagacctcaaattcaaagagctggactggccattatggaggaggagctgcagcattcccattgt

SEQ ID NO: 885399 - DNA, 99 bp, Homo sapiens
tcagaccccgcacatattgctgaaaggcatggtcacaaagaactcaagaaaatcttcgaagacttttcaattcctgacattcagacaactgacttgtaa

SEQ ID NO: 885400 - DNA, 99 bp, Homo sapiens
tgatatctaaaaagcagaatgtgcagagtcttttctttgccaagcaaaacagtttccaccacattatgccaagggctttggtggccagtatggaatcca

SEQ ID NO: 885401 - DNA, 98 bp, Homo sapiens
gactccctttgttggagttttgcccacgcgttgtaattaagcctcgcacaatatgggagaagctcagtgggtgaacggaggacattggcccaatctag

SEQ ID NO: 885402 - DNA, 76 bp, Homo sapiens
caccagtagcttttctgagaatacttgctgaaaaggaagttttctggaatggtgaatctaacattataagcatttg

SEQ ID NO: 885403 - DNA, 99 bp, Homo sapiens
ccccctgaaaaacggatgagacttcaatatcatggaaatcaggacagtggcagttggaattgtggcaatcaaaggggtggaaagtgaattctatcttgc

SEQ ID NO: 885404 - DNA, 100 bp, Homo sapiens
ctagaagatatttgctgcagcctttagggctgatcccttatccaacatggttctaaccttcagtactaaagaagatgcagtttcctttgcagaaaaaaat

SEQ ID NO: 885405 - DNA, 99 bp, Homo sapiens
ggatgggttctctgagcttcggtgggatgaccagcagaaagtcaagaagacagcggaagctggaggagtgacaggacccgtgcatctcttccgactctc

SEQ ID NO: 885406 - DNA, 99 bp, Homo sapiens
caagactggggctgctcccatcattgatgtggtgcgatcgatgaacaagagaactgggcaacccatgatccacatctacctggacaaggaaacaggaaa

SEQ ID NO: 885407 - DNA, 99 bp, Homo sapiens
gggattctcgacctgctaacagaactggaccttttcggagccgggtgtgggctgagccctgcctgattgatgctgccaaggaggagtacaacggggtga

SEQ ID NO: 885408 - DNA, 99 bp, Homo sapiens
tcacccgctacgggaagcaggcctcgccacagatgactctgaaggagtttgccataatgaatgaggaccaagatgatgaagagtttctgcagcagtacc

SEQ ID NO: 885409 - DNA, 99 bp, Homo sapiens
gataaaccaacagaacctgacagaatggatagaaattttaaagactgttgtgaacagggatgtacctaatacattcagtcccctgaagctgaatatgta

SEQ ID NO: 885410 - DNA, 100 bp, Homo sapiens
cctcagtttgtgcaggacaccgacatggaacagggactcactgggggtggaaatggatattgttgaaaaactggtgaaaatgataccttgtgagcatgaa

SEQ ID NO: 885411 - DNA, 98 bp, Homo sapiens
ggcaagaggaaaagcgacagctcagctgtccagaccaaaacgaagaagacgttagccaaacccaatataaggaatgttgtggtggtggatggtgttcg

SEQ ID NO: 885412 - DNA, 100 bp, Homo sapiens
caggaagaggagagcagcaagcgggctctatgaacacatccatgatctcagccttttcctcttcaatgatgccctgctcgtttctagtcggggcacatct

SEQ ID NO: 885413 - DNA, 99 bp, Homo sapiens
tctgtgtacgctgaggggggaggatgaaattgattctgcagtaaagatgttggtgtcattaaaaatgagctacaaagctgccgcgggggaggattacaa

SEQ ID NO: 885414 - DNA, 98 bp, Homo sapiens
aggattccaagtaactcttatttgcagaaaaagtcctacctggagcgaagcgttaaggaagctgaggacaacatccgggagatgctgatggcacgaag

SEQ ID NO: 885415 - DNA, 99 bp, Homo sapiens
gcttcccgagtatttcctccagagattgtggagcagatggatatttcacattttcaggaacaaaatgatttaaaagcattgctagaaaatctccttcaa

SEQ ID NO: 885416 - DNA, 99 bp, Homo sapiens
gatgaaaaagcgaaaaacaagagtcttgtcaagatttggtgcaaaacttttaccaacaaggttgctacaagatcaccacggttttcagccatgctcaga

SEQ ID NO: 885417 - DNA, 98 bp, Homo sapiens
gaaggaagacttcgaggaagccaggaagaaggcactgaagcttggggccaaaaagtggccttcaagtcacaggacgcagcgattccctgccctcttcg

SEQ ID NO: 885418 - DNA, 98 bp, Homo sapiens
tctctgtagccatcactgagaaatctggattttcaagtcacccacaaaagctgtatataatgccagacattggaatcatccagattcagaagaactgc

SEQ ID NO: 885419 - DNA, 98 bp, Homo sapiens
gagagactgtggagtttgatgttgttgaaggagaaaaggtgtgggttgctgaccgaggaaataaaagaatccaagtatttgataaagacactggggag

SEQ ID NO: 885420 - DNA, 75 bp, Homo sapiens
aaacaccagatgatgaccctgagcaaggaaaatctgagggggatggcattcctactgtatttgtggcagtggcag

SEQ ID NO: 885421 - DNA, 98 bp, Homo sapiens
gttcatggagagcaaggagaaggatcgccaggtgctggaggacttcccaacggcctcctgcagatgcagctgatcctgcactacgacgagacctaccg

SEQ ID NO: 885422 - DNA, 76 bp, Homo sapiens
cctgttgccattatagagctggaattaggcaaatatggacagccaggaaatgtgaagaattcacctggaactaagt

SEQ ID NO: 885423 - DNA, 99 bp, Homo sapiens
tgatgtgcagtgtccaaagagagatatccttggaacagaagatcttattgtggaagtgacttccaatgatgctgtgagattttatccctggaccattga

SEQ ID NO: 885424 - DNA, 98 bp, Homo sapiens
tatatctggctcatggacaaggccctgctctgcagcgggcaattgaaggaacagactaaaaatcgtgtcctggaaggaaactacaggtactaccaggg

SEQ ID NO: 885425 - DNA, 98 bp, Homo sapiens
gggaacatcaccttgcccatgtctcacgcggagatttaccgcattgtttctcagaagcaaatgtcagacagacgcgaaaatgacatgtctccaagcaa

SEQ ID NO: 885426 - DNA, 99 bp, Homo sapiens
aaaagaaaagctagcatatctttgactgatgacgaaggacctttattgggcttgaggtcacttcagggcatgcccagttcctggacctggtttcagagg

SEQ ID NO: 885427 - DNA, 98 bp, Homo sapiens
gaacccagacacaagtcttcactccttcctgcgagccctgaggaagccttataagtatgctgtgcgcttcatccctcgggagaatggcgtttacctga

SEQ ID NO: 885428 - DNA, 76 bp, Homo sapiens
gtggttgtggatcccattcagagtgtaaaaggaaaggtgttggagcgggccggagagaagtagagtgggctgcgag

SEQ ID NO: 885429 - DNA, 100 bp, Homo sapiens
cttatggcggcgctggagagggggcgctgagctgttggggggtggagttcgtggttcccaggactggcttttattgcaagctgtgtgggctgttctacac

SEQ ID NO: 885430 - DNA, 98 bp, Homo sapiens
cagggatgtctacctggtaatagaggacttgaagcagaaagcaagtgaatacgagtcagaaggactgaatttgctcttaaagaaatcatgtcctctgg

SEQ ID NO: 885431 - DNA, 74 bp, Homo sapiens
gtcagtccgccgctcaccccgcggccgcaccttcccgccttctcaggaattcgatgtcttctttccgtcctggg

SEQ ID NO: 885432 - DNA, 99 bp, Homo sapiens
tgggtttgaacggaatgctggagtcagtggaagacggagctggtcggcccgaaggttttcaaatggaacattttgatgcatcacttagtacctatttca

SEQ ID NO: 885433 - DNA, 98 bp, Homo sapiens
tctcacctagtatgtgagcagtccctgcagatggcccatttggagatcttgacaaagcctcttctgtttccaatgggatggtccccatccctgctgga

SEQ ID NO: 885434 - DNA, 99 bp, Homo sapiens
gactgggcacagcatgagatccaaaggcagggcaaggaaactggccacaagattctggactctacttataatatccctaactgctggattctcctgttg

SEQ ID NO: 885435 - DNA, 100 bp, Homo sapiens
ccccatctgccctgcctacaagttggccaggaacaaaagcatacctaccttcccctagaggcatctccttggaaacaatgccatctttgaatgtgagaga

SEQ ID NO: 885436 - DNA, 99 bp, Homo sapiens
ggaaatcaaaccgaaaatgtgtatataggaacatgtttgacaagctgaaccgtgatgcctttcatataatttcttattttttgtttcaagttctggacc

SEQ ID NO: 885437 - DNA, 74 bp, Homo sapiens
ccggtttctcccacatcgacctgagagcctccttttcacctgaccagaagaggctggggtgagtttcccgtcag

SEQ ID NO: 885438 - DNA, 99 bp, Homo sapiens
tttttcgaggagagtgaagaggcgagaaaaacaatttccagccgatgtgtttgcccagtctcaaatgccatgtgccgagaactgccccagtcaatagtc

SEQ ID NO: 885439 - DNA, 98 bp, Homo sapiens
agcaccgggctcttgatggacttggcagccaatgaaaaggccgttcatgcagacttttttaacgtggcactaaggaaaacagatcatctctccctaga

SEQ ID NO: 885440 - DNA, 76 bp, Homo sapiens
cgggcacacaagaatggtcactgtctggagcccccaactcccttgacagtgtacgctggagcaggttccagggtgg

SEQ ID NO: 885441 - DNA, 76 bp, Homo sapiens
agaagagaggaaagtggaggtcacctactatcacaaaaatggtttgttggcatccaaagctgttggggttgatggt

SEQ ID NO: 885442 - DNA, 98 bp, Homo sapiens
ccaggtgtaagcgcagaaagcaggcgaacccgcggcgcaataacgatccagacatttaatgtggatgcaccatgccagaccgtggaagatttaacgaa

SEQ ID NO: 885443 - DNA, 99 bp, Homo sapiens
agcttcagacaagcccagccaggagaccctgaccaggaagcgggtctctgccagttccccaagtatgatctcgtgaaatcttgagagaaactgaatgac

SEQ ID NO: 885444 - DNA, 98 bp, Homo sapiens
gtacaactaccgctgctggaccacaaaccgctgccagaaaagtttgagcgggagcagaacgacaccttcatcatggagatcctagacattgctccatt

SEQ ID NO: 885445 - DNA, 98 bp, Homo sapiens
gctaacctcggggaccgagatgcagcaggagcattggtttgaaaaggccctacgagacaagaagggcttcatcatcaagcagatgaaggaggatggcg

SEQ ID NO: 885446 - DNA, 98 bp, Homo sapiens
ataagaagagaagatggacagtttcagtgcattacaggtgagaagaaatttgtttgtccagaatgttcaaaacgctttatgagaagtgaccaccttgc

SEQ ID NO: 885447 - DNA, 100 bp, Homo sapiens
aaagcaagtatctggatcttttaccagctaaatttggaggtggatattccatctattataaccaagaaactattaaaagcagcaatgaagcatatagaag

SEQ ID NO: 885448 - DNA, 100 bp, Homo sapiens
ctttggcatcactgcagctagtaatttgccttctggattgtacagaggtgcagttccatggtacaccataaatcttgacttaccaccctacaaaagatgg

SEQ ID NO: 885449 - DNA, 99 bp, Homo sapiens
gtgttggaccttccggagcttctcagaagacagagggttttcttttgagctcccagatggacgtatcatcaaagttgggggagagagatttgaagcacc

SEQ ID NO: 885450 - DNA, 75 bp, Homo sapiens
ctccgtcccccgcgggtctgctctgtgtgccatggacggcctacagacctggtacctggatttttgcccgagatg

SEQ ID NO: 885451 - DNA, 75 bp, Homo sapiens
ggaaggttccctcaagtccaagattgggtgagatacaattccatggaattttaccactgaaccagtggagggcta

SEQ ID NO: 885452 - DNA, 99 bp, Homo sapiens
ccatcaccgtcagcgctgcggagatctacaatgaggtcctcagggtccgcaagcaggtggtgaacatcccgtccttcattgtccgcctggattcccaga

SEQ ID NO: 885453 - DNA, 98 bp, Homo sapiens
tttctcaagcactgtgatcttcaaatgactcctcatctgtttttaagagggaaatctgagttttcaaggaaagccgaatacagttgccaagttgccag

SEQ ID NO: 885454 - DNA, 99 bp, Homo sapiens
tgaggacatcttcagattgattgcgttctactgtgtcagtagtgctgggcctaaaggagataacatttatgaatggagatcaactatacttggtccacc

SEQ ID NO: 885455 - DNA, 98 bp, Homo sapiens
cggacacctggaagctgggaaatgaaaggaagctgttgaagttattgaagtacctgttgctatattctaagaaattaaaatgtccagaaatctgcctc

SEQ ID NO: 885456 - DNA, 99 bp, Homo sapiens
ttgtgcctgacaggaccgtggccgaccggcagctgagtgcatcggatggcttctggaaatctgtggccactcgagtgcccaaggagccccctgagattc

SEQ ID NO: 885457 - DNA, 98 bp, Homo sapiens
tgctacttaccacctgccgccggttgccggaggccatcgaggaagtgaagaagggctatctgatgggttagagtgcctttgagaagaaatcagtggat

SEQ ID NO: 885458 - DNA, 98 bp, Homo sapiens
gaagccatgatttaaatatcggcgttaaggtattatagctgcaaatgtccttgtattctgtttatggagagtaccttctctgcagcggacaatgatca

SEQ ID NO: 885459 - DNA, 99 bp, Homo sapiens
cttcggtccctggctgacattgggaagacagtctccagtgcaagtaggatgtttaccaaccctgataatgatgttaattattcatactgcatgactgag

SEQ ID NO: 885460 - DNA, 98 bp, Homo sapiens
gggagtgtcgcagccctgaagttgcctcttctggtgtcaaagcttttggacattcctggggcaccaccttccatggtcaataatgaacaacgccagca

SEQ ID NO: 885461 - DNA, 99 bp, Homo sapiens
aggcggccacgcgcggcgccgctcggttgtctgcattcaaaagagcattctattaaagctaccttaatttggcgcttatttttcttaatcatgtttctg

SEQ ID NO: 885462 - DNA, 98 bp, Homo sapiens
tatgcagtcccccaggatacagggtcaaaggagagcacaaccatcgcagttggaagcccatggggcagatttgaggcttaagcaacttcttccgggga

SEQ ID NO: 885463 - DNA, 98 bp, Homo sapiens
ttggatcggatccttctggagtccgtgtgccagcaacagagctgggtccgggtgtacgacaaattggagacaatctgattgttcctggaggagtgaag

SEQ ID NO: 885464 - DNA, 76 bp, Homo sapiens
atcggaaattcatctctttgatgtcattaagactttatggacagcagcctgctaaccaagtcatcattcgagagcg

SEQ ID NO: 885465 - DNA, 99 bp, Homo sapiens
tgcaaccttgacctcctgggctcaagcggtcttcacacctcagcctccccagtagctgatcctacagtttggaaattttagcattcaggtgccaggaat

SEQ ID NO: 885466 - DNA, 76 bp, Homo sapiens
cctcaagctgctgctgaaggggagagctttggttggcacagctgcccaaactccaaaatgatggtagagaattgac

SEQ ID NO: 885467 - DNA, 74 bp, Homo sapiens
ggagaacgaacatcttctggacctttgtccagatgatgattattctccaccgtctaagagaccaaaggccaatg

SEQ ID NO: 885468 - DNA, 99 bp, Homo sapiens
tggctgcatttctacaggacagcagcttcctctcctctcttagacctttcctcatttgaccacgttgttcctgagcctgggacaagcctgctcgctgcc

SEQ ID NO: 885469 - DNA, 99 bp, Homo sapiens
gatacaagatgaagagcaagcccctaggaatctgcctgataatcgattgcattggcaatgagacaggtgagtggcagtgtgatgagtgtttatagtgga

SEQ ID NO: 885470 - DNA, 76 bp, Homo sapiens
ctggaatatgaagagacacagtatggtagccacacccccaggcgctgtgtggctgcactgtgaacattcccactat

SEQ ID NO: 885471 - DNA, 98 bp, Homo sapiens
taatattctcttcagagattctgcaaatgcgacaagcctcccagacttaattcagtgcacaaatgagatgaatgtgaacatcccacagttggcagaca

SEQ ID NO: 885472 - DNA, 99 bp, Homo sapiens
tttggccggacttttgctaactgcggcgggcgagacgttctcagtggcccaccctcaggaccctcaccacccatcagagaagcctgtcattcactgcca

SEQ ID NO: 885473 - DNA, 99 bp, Homo sapiens
gaaatctcccaggaagatcaagaaagtgggaaccactgagaaggaacatgaagggtgagcagggcagcatttccttctcccactgctgctgagatggca

SEQ ID NO: 885474 - DNA, 100 bp, Homo sapiens
ccagaatccaccgtcaggcataaattgattattcctcgcccacatctgtgccagaatcctcactatggatgggctcattgaggacattaagcatcggcgg

SEQ ID NO: 885475 - DNA, 75 bp, Homo sapiens
gatcggcggagaccctcgaagtgcgcaaacttgacactcaccctgaccgcatctacgtcatgggcttggttctgg

SEQ ID NO: 885476 - DNA, 98 bp, Homo sapiens
ttctcctcttttcttacatcattcccataagtgttaagtccaaaagtgctgggcattgccatcgctcggtatgacttctgtgcaagagatatgagaga

SEQ ID NO: 885477 - DNA, 99 bp, Homo sapiens
ggtttaataatgatagaatgaagaccacaataaaagagacctctacttagctcagcaattcttaccttagtgatcagcagctggactgtgccttggacc

SEQ ID NO: 885478 - DNA, 100 bp, Homo sapiens
gtcagccgactatggcactaatctgcaaactgtgcaactgttcatgaagaagaaccaggtcacttcatcctggcccaggtactgcagctccaaatcgtgg

SEQ ID NO: 885479 - DNA, 75 bp, Homo sapiens
ttcgatagaccactgcctgtgtctcgtcttgtatctctaattggaagcattcttcagattattaaggaatcccag

SEQ ID NO: 885480 - DNA, 75 bp, Homo sapiens
aaccgcgaccgagacggcagtgcggcggaagcgctgagatgagtgaactgagtgtggcacagaaaccagaaaaac

SEQ ID NO: 885481 - DNA, 98 bp, Homo sapiens
ttggaggctcaactggggccacatcccctctcatcccagctccatctcctccgaagggaatgaactcctcgtccagttcgtctcagatctcagtgtca

SEQ ID NO: 885482 - DNA, 99 bp, Homo sapiens
gggcctcccgtttctggctccgggctgagcttcctggagaagaggaagtaagaagactgttagaatgccctcggtaacacagaggctgagagatcctga

SEQ ID NO: 885483 - DNA, 76 bp, Homo sapiens
ctgcaccgacctcgacgtcttgcctgtgtcccacttgttcgcggcctatagacttttactccccttgtagataaac

SEQ ID NO: 885484 - DNA, 99 bp, Homo sapiens
ctgagtggttgtgtggtcgcgtctcggaaaccggtagcgcttgcagcatggccctgggcagtgacggggttcgggtgaccatggagagtgcgctcaccg

SEQ ID NO: 885485 - DNA, 99 bp, Homo sapiens
tgatttgggaagcctacaccattcaccttaggttttccgaaattctctgtatgcaccagattattcatctcgtttagatattgtaagagcaaattcaaa

SEQ ID NO: 885486 - DNA, 98 bp, Homo sapiens
aacgatggtcccccaggtcgcgatggtcaacccggacacaagactatcggtggtccatgtcaagtgatagttcacaagtgggagactcatctacaacc

SEQ ID NO: 885487 - DNA, 98 bp, Homo sapiens
gaaattacctctcagactttctgtaaaggaaaacaagtgattccagcagtctcagcagcactgatgctggattgtttaccaatgatgagggaagacaa

SEQ ID NO: 885488 - DNA, 76 bp, Homo sapiens
gacttccctttggatgtagcaaggaagaaattgttcagttcttctcagaatctccaatgaaaactatgttcctcac

SEQ ID NO: 885489 - DNA, 75 bp, Homo sapiens
cccagagccacttctcaccgagatgattcatgaattgtggacatcggatacccaaggagacgaagctgaagcagg

SEQ ID NO: 885490 - DNA, 98 bp, Homo sapiens
tcccaagtagctgggattgcaggaacctagaaagattgtacaatgaatggtgattctcgtgctgcggtggtgacctcaccacccccgaccacagcccc

SEQ ID NO: 885491 - DNA, 99 bp, Homo sapiens
tggatacgcggactttgttgctgcttgcagtaaccttatgcctagcaacatgccaatgtgtatcaaaccgaatgataaaaaagcagcacacatcttcaa

SEQ ID NO: 885492 - DNA, 99 bp, Homo sapiens
gctcaggcagctccgtagcatgaggaagagtcaggggcacagagagatggagagagacctagttagtatcttcaaccaatcttgtcactcctccagcag

SEQ ID NO: 885493 - DNA, 99 bp, Homo sapiens
gacagagattgaactcagctatgcaaagcaactcaggtgattttctatgatagcgactggaaccccactgtggaccagcaggccatggacagggcccac

SEQ ID NO: 885494 - DNA, 99 bp, Homo sapiens
ttgcctctggttcagctcatacaacagcttcttagttgaccactgaaaaacacacatactatctgactgcagattctcccaatatattggaagagtgga

SEQ ID NO: 885495 - DNA, 99 bp, Homo sapiens
gagaaggtggcctcggcagtcctgtttccctgtaagggagaagaagtgggtgactgtgggtgacacgtccctgaggatatttaagtgggttcctgtgac

SEQ ID NO: 885496 - DNA, 99 bp, Homo sapiens
cttcagaaagcctccggaatctaaaaagccctcagtaccagagacagaagcagatggattcgtccttttagcctggtgtgtccgtttctctggtgaatc

SEQ ID NO: 885497 - DNA, 99 bp, Homo sapiens
catgggaaggaggccgagccgggatctcaggtcctcgggggcggcggccacgccaaggacggagcggttccgccaccccagccgcagatgtttggtgaa

SEQ ID NO: 885498 - DNA, 98 bp, Homo sapiens
ccataccggacccgcaagcatgcccaccactgccacaaacgccgcaccaggtcttgtagcagcgcctcctcgaaccactctgaagcccctgactgtgc

SEQ ID NO: 885499 - DNA, 99 bp, Homo sapiens
cctggggctgaacgcggctttctggatcacctgctgttaccagctaccacccataacaagaccacaagaccaaaaatgtcaattgtgttaccagcaata

SEQ ID NO: 885500 - DNA, 76 bp, Homo sapiens
agttttctcatgctccactgactcctgaaacacaagaattgttggctaaagagaaatacgaatgtgctttaaagcg

SEQ ID NO: 885501 - DNA, 100 bp, Homo sapiens
ctttcttcaagatggaacaaagactgttgagtatgctccatgtagatcacctctgtcagattcagggagttttgtatcttctcgagcccggcgagaaaaa

SEQ ID NO: 885502 - DNA, 99 bp, Homo sapiens
ttatggcggcgctggagagggggcgctgagctgttgggaggcgtagaggctccggtgttttttgtgccaattgcctgaccacaaagacctctctctggc

SEQ ID NO: 885503 - DNA, 99 bp, Homo sapiens
gaaaatgaagattttgacagtcgtagatacaaatttttggatgatgatggatccatttctcctattgaggagtcaaccctgagaaatgccagtggcctg

SEQ ID NO: 885504 - DNA, 98 bp, Homo sapiens
agggaaaaatggagttgtggaactgatgtttaaaatcattggaccatttagtaagaagaattccagtcttataaagttcaaaccttgtactactcagc

SEQ ID NO: 885505 - DNA, 99 bp, Homo sapiens
cctactcttctaaggatcgctgtcctgacagaagagattagtgatgatgaaccaggttatgaccttgatttattttgcatacctaatcattatgctgag

SEQ ID NO: 885506 - DNA, 98 bp, Homo sapiens
ccatacgcaggaaatgaccccaacgccaccgagagggcgcctggaatgaattacatgaacgacagccttcgcaccgacgtcttcgtgcggttccagcc

SEQ ID NO: 885507 - DNA, 76 bp, Homo sapiens
ctgtgtccaggtcaggtgggttttttggatcgaggccatcaagctacagatggtcttacaaatggaaccccaaatg

SEQ ID NO: 885508 - DNA, 99 bp, Homo sapiens
ctcggagcgcggtccctgtattggtctcctgctcctagaggcccgatgagagaaagggaaagttaaggatgctggagcagaacaatggatttctctttc

SEQ ID NO: 885509 - DNA, 99 bp, Homo sapiens
cagccttcgacgcgatgttccgccggagcttgaatcgttttgtatgagaagatgatcagtggtatgtacctgggtgaaatcgtccgcaacatcttaatc

SEQ ID NO: 885510 - DNA, 98 bp, Homo sapiens
gtgattgtgggagccctgctcatgggtctccacatgagccagaaacacacggagatggacattgcatattaccaagccttgtctgctgagaggttgca

SEQ ID NO: 885511 - DNA, 98 bp, Homo sapiens
tgcgacacacgggccaaatatcgagagggacgacggcctcgtgctgtgaagctgaatagcattggcaattactacaagccgtggttctttaagcatgt

SEQ ID NO: 885512 - DNA, 99 bp, Homo sapiens
gcaaaaccatacagggctatgatgctattgtggttgaacaatggacagtcctggaagagttcatgatcaagtgttgcccacaccaaatgcttcatccag

SEQ ID NO: 885513 - DNA, 76 bp, Homo sapiens
ctggaatgggagagagagcgcagaatatcaagtgctggtattgaaatagaagagttacagaatgaggaagaagaac

SEQ ID NO: 885514 - DNA, 98 bp, Homo sapiens
gtctctctctccatctgtctctacaaaatctctaagatgtccttagccaacatttacttggagtccaagaggtctgcggggtttccgagaggctcgcc

SEQ ID NO: 885515 - DNA, 99 bp, Homo sapiens
aaccttgacttgcagcacaatgaactgctagacctcccagatactataggtcctcatgctgataccgccagtggatgccagaatttgcagtgtggtttt

SEQ ID NO: 885516 - DNA, 99 bp, Homo sapiens
gagaacccgcccatgaagccagatttctcccagataataccactagtctgacggataaacacctggacccaatcagggaaaatctgggaaagcactgga

SEQ ID NO: 885517 - DNA, 75 bp, Homo sapiens
gttataagagagggagagataaaccaccgcttacagatattggggtgcatctgagaaagacatcgtgcactctgg

SEQ ID NO: 885518 - DNA, 98 bp, Homo sapiens
tcagctctcggcgcacggcccaggtattgttgcagcatctggcagtgagactgaggatgaggacagcatggacattcccttggacctttcttcatccg

SEQ ID NO: 885519 - DNA, 98 bp, Homo sapiens
gcagaagcaagtacgccaaaatctgctttgaggataacctagggctacttctccaggagaacagcaggtttgcagaagcactacattattataaattg

SEQ ID NO: 885520 - DNA, 73 bp, Homo sapiens
ggaattttgatatctttctatttgatagactaacaaatgcttcgcagaatcaagaacggctatgtgcgtttaa

SEQ ID NO: 885521 - DNA, 98 bp, Homo sapiens
gggaatgccacagcatcctccagcacctcagcccctgaagaagatggccgaccggatcaggaagtatcagatcttgaacaatgaggtttttgccatcc

SEQ ID NO: 885522 - DNA, 100 bp, Homo sapiens
cttgactggagacaacctgcagcctcctggcaccaaagtttcagatacaccacctccaccgccacctgtggaagaaccagtctttgatgagtctccccca

SEQ ID NO: 885523 - DNA, 99 bp, Homo sapiens
ggcagagcttcttggatgatgatggacgtcccaccgggcaggatgaaggcagagcgtgtggcatctccacctcaagggaattgaaagatgttggccatc

SEQ ID NO: 885524 - DNA, 99 bp, Homo sapiens
ccgtttaacctttattgtggtggagtccaccccgctgtggtgaagagtgttgagctcagcccccatacagattatcaactcaaggctgttgtgcaaatg

SEQ ID NO: 885525 - DNA, 99 bp, Homo sapiens
tcgacaccatggtggacacttttcttcagaagctggtcgccgccggcagttccgccaagacgtcaccaagtgtcttttcctaggtattatttccattcc

SEQ ID NO: 885526 - DNA, 76 bp, Homo sapiens
cctggatctgcgatctgtttgtggatgaacgtgaagccagagaaaatgtgaagagagagcaagatgaggcctatcg

SEQ ID NO: 885527 - DNA, 75 bp, Homo sapiens
taaatatctccatcattgatgacaatgaaagcaaaatcgtgtggtgggagctatgcagctatattctgtagatag

SEQ ID NO: 885528 - DNA, 98 bp, Homo sapiens
aggaaggaggatggaggctggtgggagggacagatcaacggcaggagaggtttgttccctgacaactttgtaagaccatcctggggtctccagctagt

SEQ ID NO: 885529 - DNA, 99 bp, Homo sapiens
gtaaatgattttatcatcaaggcagcagctgttacccttaaattactccacaggatccgctgaacataggatgttgccacaaaatctacctcgtgtatt

SEQ ID NO: 885530 - DNA, 99 bp, Homo sapiens
gttcagttcgtcatggggctgtttggaaagacccaggagaagccgcccaaagaactggtctaaatctcaaaacatcctcagcacagaggaggaacgaac

SEQ ID NO: 885531 - DNA, 99 bp, Homo sapiens
ggaaacaaaatattcatgctggatattgaggaggaagagttcatcgattggtggagcaaattctttgcctccataggggagagggaaaagtgcggctcc

SEQ ID NO: 885532 - DNA, 98 bp, Homo sapiens
ccagaatggttatctacacacccttctcatggcaatcgagttgagtacttggatagacttatacctcaggctggagcattggatttgctaaaggagct

SEQ ID NO: 885533 - DNA, 98 bp, Homo sapiens
ttcaatgagtaaacatattcctatgatgataattccgaagaaggcttccacactattcattcaggaaggcatgaatatgcattcagcttcgagcttcc

SEQ ID NO: 885534 - DNA, 99 bp, Homo sapiens
agaaatgaagaattggaggaacagtgtgtccagcatgggagagtacatgagacgatgaagcaaagataacgaaggaggcccaacttcattcaataagga

SEQ ID NO: 885535 - DNA, 99 bp, Homo sapiens
cggcacccgtggcagccctggcggacgcaggagcgatggcagcgaccgatatagctcgccaggtgctcaatctgaaattgaagtgtctgtctctgcaag

SEQ ID NO: 885536 - DNA, 98 bp, Homo sapiens
tggaattctccgtccctttccagggagggaacaaagcccacagcaccgaatacctcctctgaaaaatggcagaagcagttttccatgccccaaagagg

SEQ ID NO: 885537 - DNA, 76 bp, Homo sapiens
ccatcacccaccaacaacaccacaataatccacagccaaggtctgtgacaagcagggaacaaggcaacggacggcg

SEQ ID NO: 885538 - DNA, 76 bp, Homo sapiens
ccaaagtttatactatcagaccttattttcctaaggatgaggtagaagcagtaagtacttcagtgcaggactcaag

SEQ ID NO: 885539 - DNA, 98 bp, Homo sapiens
ttcttctcagtgagaacgttgatctgcaccagaaagtggaagacctacctgacttggaagatgatgatgaaacaggcaaatctctggaagaccaggtt

SEQ ID NO: 885540 - DNA, 99 bp, Homo sapiens
gcccagagactgctgagcccgtccgtccgccgccaccacccactccggacacagagtccggcagcgtcttctcttgagggagcaatttggagaagagct

SEQ ID NO: 885541 - DNA, 100 bp, Homo sapiens
ctcggctgcgcgctgctcctcgccctcaagttcacctgcaggagcacatctacaagctgatgaagagtgacagctatgcccgcttcctccggtcaaatgc

SEQ ID NO: 885542 - DNA, 50 bp, Homo sapiens
ggaccacttcaatgcagatgggtctgagaacacactgttgcagcagctag

SEQ ID NO: 885543 - DNA, 98 bp, Homo sapiens
tgttttgtgatggaatatgttaatgggggcgagattgagaggatccagaatccagatctctggaatagctaccaggcaaagaaaaaaactatggatgc

SEQ ID NO: 885544 - DNA, 98 bp, Homo sapiens
agggcagctgaaagacagagaccttcaggagtatgctgctgctgttccgctttgcgtcctcgctacaaacgcctggtggacaacatattccctgaaga

SEQ ID NO: 885545 - DNA, 99 bp, Homo sapiens
tggcggagaaggatgacaccggagtttgacgaagaggtggtttttgagttactgtaaaatggggaaaggagaaatttgaaggtgtagaattgaatacag

SEQ ID NO: 885546 - DNA, 99 bp, Homo sapiens
atggccgcgttaatcccaattcccgctctgcgggcgttctccctccagttatttctcaaactctgaggctgcggagttcacacattgaaatctgtcatc

SEQ ID NO: 885547 - DNA, 98 bp, Homo sapiens
gagctccgtgcgggtggctgtcagggatcatggcccaagttgcaatgtccaccctccccgttgaagatgaggagtcctcggagagcaggatggtggtg

SEQ ID NO: 885548 - DNA, 98 bp, Homo sapiens
gaattaatatgagaatacaagatctaacaggactagatgtttccacagcagaggaattacaggaagatgagaatgtgcctactgctcctgatcctcca

SEQ ID NO: 885549 - DNA, 99 bp, Homo sapiens
taatctgtatgaagaatggacacaagttgcaaggctacagatgcacatgttgaatggagctcttctggcattgctgtttcctgtggtaaacactcggct

SEQ ID NO: 885550 - DNA, 98 bp, Homo sapiens
ctgtgtattggaatggctgcgctggcgtcacttatgggagctttgttgcaggccaagtggcatcagagctgagtgatggacgacctgcagtcccagaa

SEQ ID NO: 885551 - DNA, 100 bp, Homo sapiens
gcagcattggtgaagttgaatctgcaaaacttattcgggataaagtagcaggatgtgaagttaccccagatgtaaacatttcaggccaaaaatttaacat

SEQ ID NO: 885552 - DNA, 76 bp, Homo sapiens
gaggcctcgatacactctacaatgacaacactgcagctgaaggaggagttgctggatggagaggattataatttcc

SEQ ID NO: 885553 - DNA, 75 bp, Homo sapiens
cccaggctcaagcagtcctaccatgtcagccttcccagtagctgggaccacagatgccgcatcctcgaaggtacc

SEQ ID NO: 885554 - DNA, 99 bp, Homo sapiens
gcagttgtatgtgtagaaagtgaaatcagaggagatgtaactatcgcgggctacattgagagacctcagctgattcgagcaaaagtgccaattgtgaag

SEQ ID NO: 885555 - DNA, 74 bp, Homo sapiens
ctgctctgccctcggcgagaagaccgtcttcgggcaagagctccgagtagagaatagtgacagtggtacaggaa

SEQ ID NO: 885556 - DNA, 99 bp, Homo sapiens
cttacaaggcttccaccagcaagcatgaacaaggctcagttatgatgtttgagcaccttattaattctaatggaattaagcctgtcatggaacaatatg

SEQ ID NO: 885557 - DNA, 98 bp, Homo sapiens
cagtctttccagaatcaaaagcagacctcattttgattgtagtagcagtggagcctccacagctttccttgctgatagccagcctccaaaccgcagag

SEQ ID NO: 885558 - DNA, 99 bp, Homo sapiens
tggtcgtgagagtcgtcagtgccctattccttcacatgtaattcagaaattagggacaggtcgtttaggccaattgggtttgaaagaaggatttccatc

SEQ ID NO: 885559 - DNA, 100 bp, Homo sapiens
caggagggccgtcaagatcctcaagaagaagaagttgcgaaggatccccaacggggaggccaacgtgaagaaagcaaggtccgtggtcctgtcagtggaa

SEQ ID NO: 885560 - DNA, 98 bp, Homo sapiens
ttctggagaattactagcaacaggagataaaggtggtagagttgtcatctttcaacaggagcaggagctgtgaaaattaagaagccaatcaagacgaa

SEQ ID NO: 885561 - DNA, 76 bp, Homo sapiens
ccgtcatcaccatcaccttcaatccgctctactggaatgtggtactgaacgacacctgggtctccttcccttcctg

SEQ ID NO: 885562 - DNA, 99 bp, Homo sapiens
tgatgaaggtcccagaggctttcctggaccccctgggccagtggggctgcaggatgacaaggagtatgtgggctttgcaaccctccccaaccaagtcca

SEQ ID NO: 885563 - DNA, 99 bp, Homo sapiens
tcacacctagataccggaggaggatcttctgcggattgttggaatctaccacatgcaagaaagcacttcagccaagcagaagggagccagctggacgag

SEQ ID NO: 885564 - DNA, 99 bp, Homo sapiens
gcctcttgatgttgactgtaaacgcctaagccccgaccaagatcactccatggatgaaatgacagctgtggtgaaaattgaaaaaggagttggtggcaa

SEQ ID NO: 885565 - DNA, 100 bp, Homo sapiens
tttcaccacaagaagggctgccaggccccttcacagatgtagtcactacaaatcttaaattgcgaaatccatcggatagaaaagtgtgtttcaaagtgaa

SEQ ID NO: 885566 - DNA, 99 bp, Homo sapiens
tggtgccaatatgagaacttatcttttagagaaatccagagtggtattccaggagtgacacacgcggccatctgggcagcatgcatttcttacctcagt

SEQ ID NO: 885567 - DNA, 99 bp, Homo sapiens
agcatattatgctccatgtggaaagaaacttaggcagtaccctgaagtaataaagccagaaacgtttgagcatctttttatcaagcatacagcatcagt

SEQ ID NO: 885568 - DNA, 99 bp, Homo sapiens
accagcaactcccccatcgtatgaatctacctggaatcatttttctgataatgaggcagagcgggttaaaatgatggaagaagtggaaaaactttgtga

SEQ ID NO: 885569 - DNA, 99 bp, Homo sapiens
cttggagaagctgaggacacacagggctgaaagaatattctcagaggttagaaggattgagaattatagagttgaaggcatggagatctactctacaac

SEQ ID NO: 885570 - DNA, 98 bp, Homo sapiens
tttcctgatgatgaagtgatttgcaatagtatgggggagcatctcttcaggccaaagaagctaaacgactaaaagaattcttagaagactatgatgat

SEQ ID NO: 885571 - DNA, 99 bp, Homo sapiens
ttttcctgaaggctcctgatgagaggaggcagccaatgttttcagttgcaccaagcttagccaccaatgcatcagcagccgcctttaatccctatctgg

SEQ ID NO: 885572 - DNA, 76 bp, Homo sapiens
cgtcacggcgtacgccctcatggggaaaatctccccggtgactttcagaaatgttgcagtctcttgcacagcgccc

SEQ ID NO: 885573 - DNA, 75 bp, Homo sapiens
cagcatgtccttctctgaatgatgaatacttttactactgtgacaacattaacgatacgtaggtaacctttccag

SEQ ID NO: 885574 - DNA, 99 bp, Homo sapiens
gggctggcatggtcatattacatcggatatctgcggctgatcctgccagcaataccaagtttccaggcccgaagagcatcccagactattgggactcct

SEQ ID NO: 885575 - DNA, 75 bp, Homo sapiens
acacctttgactcttctactgtctcagaccttagatataattgaccctgcaatcctgcgcccgggccgcctggac

SEQ ID NO: 885576 - DNA, 99 bp, Homo sapiens
tccaagtgataaattcaaggatgatccagttggaccttttggacaggaaagtgtaacatcagttacagactgccactgtcccagagcagaggactgtga

SEQ ID NO: 885577 - DNA, 100 bp, Homo sapiens
cttgcatcctgtgctgccaactccatcaatcaggtacctggggcccaagatttggtggatttctctccagtttatcgatgtctacatatatattctgtcc

SEQ ID NO: 885578 - DNA, 100 bp, Homo sapiens
ttaccctggaagttcttcatcaggtgaaagtctggttccaaaacaggcggatgaagtggaagagggtaaagggtggacagcaaggagctgcggctcggga

SEQ ID NO: 885579 - DNA, 99 bp, Homo sapiens
ggagacccacatggagacccattcagataacccactaagatcagagatactaaatcagcggatcaaaaaacaacccttttgcattttattgccgacatt

SEQ ID NO: 885580 - DNA, 99 bp, Homo sapiens
acattatttcggacacatctggtgacttccgcaagctgatggttgccctggcaaagttttttgctccactcaagcctgttagaatcaccatggaataca

SEQ ID NO: 885581 - DNA, 98 bp, Homo sapiens
ggtagttccatgctgtctgttcagacttcagcttggtgaacgggaggatgaaattgctactatggagtgcatcaacaatggcaagtccatctttgagg

SEQ ID NO: 885582 - DNA, 99 bp, Homo sapiens
ctcagccgcctcctagcggcgcggcgctcgctcctacggtgggctggatgacactttgcacacaattattgattatgcctgtgagcagaacattccctt

SEQ ID NO: 885583 - DNA, 98 bp, Homo sapiens
ctcctgcggctgcgactcaggctccggcgtctgcgcttccccatggggctggcctgcggcgcctgggcgctctgagatatagccagtaccaacgtatg

SEQ ID NO: 885584 - DNA, 99 bp, Homo sapiens
gaagaagatgaagatgaggatgaggatgaaggattttaaactgtctacggttcttaacctcatctgttaagttcccatgcctggagaagctaatgccaa

SEQ ID NO: 885585 - DNA, 76 bp, Homo sapiens
aaagacgtagaaagaaatcttagcagagtgcttgtgatttcacgtatttttgctgaactcgtaaaagagacacttg

SEQ ID NO: 885586 - DNA, 98 bp, Homo sapiens
aagatcacaagcaactctggatgggattgcaaaatggcttcgggagcaggaaagaaaagaagcagaagaagctagtcaaaaggaaatagaagaatggg

SEQ ID NO: 885587 - DNA, 99 bp, Homo sapiens
gacaaccagaaatgccctccatattttccagtgatcccagaaataaacggtgactggcaaagagctgatgcagtctggaataaaatccaagaagaaaat

SEQ ID NO: 885588 - DNA, 98 bp, Homo sapiens
ggccgtccagcagatggcggatgccctgcagtacctgcagaaggtctctggagacatcttcagcaggggtctgggaggacagctcatgagacaagcag

SEQ ID NO: 885589 - DNA, 74 bp, Homo sapiens
ccgatttaaagctgagctgcgaggaaaatggcggcgggagaatggatgatgaacttgttgttggacatagtgca

SEQ ID NO: 885590 - DNA, 98 bp, Homo sapiens
ttctaccgaccagagacccagcaccgtctcttccagttgcgcctcttctccttggtggtcttcttaagcaacagactcttccacaagacagtctacct

SEQ ID NO: 885591 - DNA, 99 bp, Homo sapiens
acggctcacctgtgcgggatggaacaaaaggagtgaaagctggacattgaagaagccaaaatctgtttccaagaaactaaagagtgtattccgagtacc

SEQ ID NO: 885592 - DNA, 98 bp, Homo sapiens
tcattccaaatgaagagatgcctgaattagtaagctgtgtgggctggactactgctgaagagctgtattcatgtagtgatgatcaccagatagtgaag

SEQ ID NO: 885593 - DNA, 76 bp, Homo sapiens
cctgcatttcctcctttcgtctttacaaggtagccgtttggcgtcgtgaggtgccgtgagcgatgtggagatgcag

SEQ ID NO: 885594 - DNA, 99 bp, Homo sapiens
ccctcttgataaaaagagatgtggggggattctcgacctgctaacagaactggaccttttcggtggactttcactgctggatgtgtgggaaaaactgca

SEQ ID NO: 885595 - DNA, 76 bp, Homo sapiens
cagtgcagcagaatatgatgaactcggcttcagtgatgctacaggacgaagaggaatggataaaaacattggcgag

SEQ ID NO: 885596 - DNA, 99 bp, Homo sapiens
ttgaaggggaccaggaggttggacacagaccattgcaatggaaatgcctccacaaatgggaagtgttcctgtaatgacgcaaccaaccttaatatacag

SEQ ID NO: 885597 - DNA, 99 bp, Homo sapiens
tcccagacgaagacagtccctggatcaccgacagcacagacagaatccctgctaccagaagcggctcagccccagggcagcacatcagagacaccatgg

SEQ ID NO: 885598 - DNA, 98 bp, Homo sapiens
ttgaacagacagattctgtcttaactaataagattggaactgtattagggtggatccatgctgtgctcacttctcaggactgtatggcttttgggggg

SEQ ID NO: 885599 - DNA, 100 bp, Homo sapiens
ctgcccatcccagtggcggctgccaaggagacgaacgaggtcactcggacactatggtgttcttttacctgtggattgtcttttatatcatcagttcctg

SEQ ID NO: 885600 - DNA, 99 bp, Homo sapiens
cagtcggtgctccggggaggtcacctgacgaggaggacagtctccgtaagaaggatgacaggattgaagagctggaagaagcactaagagaaagtgtac

SEQ ID NO: 885601 - DNA, 98 bp, Homo sapiens
ctgcgcctcagccgcgccgagcgctcacaaagcgttttcccacccgaatttaagggacgctgtgaagcaatcatggatgcaatgaagagagggctctg

SEQ ID NO: 885602 - DNA, 100 bp, Homo sapiens
cttgggacttgcctggcgactttggccggacttttgctaactgcggcgggcgagacgttctcagtctatccttcactggagtctgatgatgatgaccctg

SEQ ID NO: 885603 - DNA, 99 bp, Homo sapiens
cggcatgcaccacgcgctgagaggggaagatgatgacgacgatgaatgtggggaagagaagctgccctcctgtttcgattacgtgatgcactttctgac

SEQ ID NO: 885604 - DNA, 98 bp, Homo sapiens
cttcaagctgctcatcatcggcgacagcgataaccagttcaggatgtccatcctggaacgactggagcagatggagaggaggatggccgagatgacgg

SEQ ID NO: 885605 - DNA, 100 bp, Homo sapiens
tgttcatagtggctttccagttgtttgacaagagtggaaatggagaggtgacatttgatcagagtcaaggaatgtgtttataatggacacttcatccaaa

SEQ ID NO: 885606 - DNA, 99 bp, Homo sapiens
gactggctttgcaagagaaactgtctacataagaccatcatcatgtggaaactgaccagggatgagaccaactatggaattccacagcgtgctctgcgg

SEQ ID NO: 885607 - DNA, 98 bp, Homo sapiens
acagagtcaggaagattgagaggcaattaagttggaatatgcaaggttggttaagttggcccaagaagacaccccaccagaaaccgattatcgtttac

SEQ ID NO: 885608 - DNA, 99 bp, Homo sapiens
cagggcccaggggcttgccaggagacgcaggtcgtgaagggttcccaggacccccagggtgttcagacttacatctcttggatatgttgaccccaactg

SEQ ID NO: 885609 - DNA, 98 bp, Homo sapiens
ccaaacccgaggttgctgacgagggcccactggagggttcccccagcctagccaggttcttccaggttggaaagagaatatgctggagagctgtctcc

SEQ ID NO: 885610 - DNA, 99 bp, Homo sapiens
agaaatctgaaaatgcccctggggagacacatgcacaagacagctcacaggcagaaggaattttccttgtcttggatgagacttttgacttggactttt

SEQ ID NO: 885611 - DNA, 98 bp, Homo sapiens
gctggtgcaatgcttgccttgggactaatgacatgcttgtcagcttcacttaaagagaggaaacttcttggtgctcaaagcaaaggagatgggcctcc

SEQ ID NO: 885612 - DNA, 99 bp, Homo sapiens
atactccaatgacttcacgtctttgacttatgatctaatccggagtggggataagccccagctccgggtcctcgactctgctgcctcgcctggactcct

SEQ ID NO: 885613 - DNA, 98 bp, Homo sapiens
agatccacagctaagactccaggaccctctggaagcctagaaatgttaacccagtatccactccagttgcacttcccacaccagctctttctccaagt

SEQ ID NO: 885614 - DNA, 98 bp, Homo sapiens
gagaccagaggccgaactcgggttctgacaagatggccgggctgccccgcaggatcatcaaggttaatttggagtggcccctggagtcagtttcctac

SEQ ID NO: 885615 - DNA, 100 bp, Homo sapiens
cttacatgttagtctacatcagggaatcaaaactgatggtattcatgggtagtttgaaatatccagatgagaatggatttgatgccttcctgaagaagca

SEQ ID NO: 885616 - DNA, 99 bp, Homo sapiens
atttttgaagagactgctagattccagccaggatacagatcttaaatttgtcaggatacatgatcccttaattcaggctcaggctgaagaactgaccca

SEQ ID NO: 885617 - DNA, 74 bp, Homo sapiens
caaaccatcctcccacctcagccttgttttaccaattcttgagattctgtatcatgttgaagaaaggaattcac

SEQ ID NO: 885618 - DNA, 71 bp, Homo sapiens
cttacgtctctgctcttcagtacaatcctatcttcaaagctgctgcgggcattctatgtccccttcctgtc

SEQ ID NO: 885619 - DNA, 99 bp, Homo sapiens
tgaatcttttcttcttgaaattaggcagactcttcaaaacgcactcattcagtttgctactagtgacaatgtcagtgcctactgcctgcatattgctga

SEQ ID NO: 885620 - DNA, 98 bp, Homo sapiens
agctgtgtggagtgttctaaccaacaaggaagatattaattttaaagacccacagtttgctgaagattacatttttaaagctgtaatgcttccaggag

SEQ ID NO: 885621 - DNA, 98 bp, Homo sapiens
aatcataaagtcatccctgtgtatgtaggagtgaatataaaaggacttcatctcctcaacatggaaactaagggaatgaaagctactggttgatttta

SEQ ID NO: 885622 - DNA, 75 bp, Homo sapiens
ggtgtccacgctgtccccgcagcccggcagcgctattgacctgaaaagtggttctggaaaagtgtaccaaggccc

SEQ ID NO: 885623 - DNA, 99 bp, Homo sapiens
taaaaagcagaagaaacatcttcgagatttcggcgaggagcatcccttctatgacagtggtggacttgctttgtgaagagacagttcatgaacaagagt

SEQ ID NO: 885624 - DNA, 99 bp, Homo sapiens
catagcacctgcagcaagatggatgtgggcagcaaagaggtcctgatggagagcccgccggacacgatgaggaagttcctggagcaggagtgcaacgtc

SEQ ID NO: 885625 - DNA, 99 bp, Homo sapiens
gctgtagtggatgcaaggaaattattagatgaattgtcagacccagaatcttcagatgccaaccctgtggtaattgagccatcatctgttttgaatgga

SEQ ID NO: 885626 - DNA, 100 bp, Homo sapiens
accatccaggatttgccggagcttactactgaaagtctgaatacgccagacaccttttgaaagctaatttttggtgaagaaatggattcggttacataag

SEQ ID NO: 885627 - DNA, 99 bp, Homo sapiens
agcaaagcgcccagcctgccgcctcgctgtccctgcggcttctggggataagtttataccatggatagcacaaaggagaagtgtgacagttacaaagat

SEQ ID NO: 885628 - DNA, 98 bp, Homo sapiens
ctacacagtttgaagagagacatttgaaatttctacagcaacttggcaaggtcttagtggtgcaatggctagtataagcgtgcgttcgagtaccccag

SEQ ID NO: 885629 - DNA, 98 bp, Homo sapiens
gagaactacgagacgcggaggtactgcacctcctccgaggtcgccgcccactactgcaagaaatataccctacgtgcctcggattctgaacggcttgg

SEQ ID NO: 885630 - DNA, 98 bp, Homo sapiens
aggatcttctgcggattgttggaatctaccgctgctgagaactagccctagacctctgcgtgagggttcttctgccgaagacatcaccagtgtgtgga

SEQ ID NO: 885631 - DNA, 100 bp, Homo sapiens
ccatgaccctgaaggtccaggagtacccgaccctcaagagagttaagaaagacgtggacaagggcacacggcactcagacatgttcctgctgaagccaga

SEQ ID NO: 885632 - DNA, 99 bp, Homo sapiens
gcagtgggattttgggactcgcctttgccctggcaaacactggaatcctactttttctgtataccaagcttggctacgcaggcaacactgagccccagt

SEQ ID NO: 885633 - DNA, 76 bp, Homo sapiens
ccttttccctctccctttccctaaggatttaggtcctgaatatgaaggtatatttaacacttcattgcagtggatc

SEQ ID NO: 885634 - DNA, 98 bp, Homo sapiens
acctccctgcgaccgtcgcggaccatgggcgacaaagggacccggtactccaaagattcaggtttactcacgtcatccagcagagaatggaaagtcaa

SEQ ID NO: 885635 - DNA, 99 bp, Homo sapiens
attcaaggaatggttccccaaataagttcagatcttcttcaagaaccctaaggactctgcaatatgaataattccctagagaacaccatctcctttgaa

SEQ ID NO: 885636 - DNA, 99 bp, Homo sapiens
gaccatgttcaccagcaccggctccagtgggctctagatgtaacctagaagtcaagcggtaaaacaagctttgcaactatgtggatggacaagatgtaa

SEQ ID NO: 885637 - DNA, 99 bp, Homo sapiens
aggaattgttttggcctaggatcatccagaggtgctgatactcaaagaaggtttaagttgtctgatctctctataaattccactgaatgtctacatgtg

SEQ ID NO: 885638 - DNA, 98 bp, Homo sapiens
ttttgaagaaatgatgaattacattccaggtatgcctgcagcatctttagtgacccctgctgatgttatcaagacgagattacaggtggctgcccggg

SEQ ID NO: 885639 - DNA, 100 bp, Homo sapiens
gattctcaacctatgcaaccagtccttcattcccgcatttttccaggcacacatggcaagataacccctgtgacagaaggctactgttgctgtaacaaag

SEQ ID NO: 885640 - DNA, 100 bp, Homo sapiens
cagacatgtgagatgctacagcagtgtaaagaggaattcattaagaaagaccacagcaagattctttcattcgtctcctcctagcctgggggaccaggct

SEQ ID NO: 885641 - DNA, 99 bp, Homo sapiens
ctcaacaatgcaaggaggtagacatccttatcagcacagcacttattccaggatggtgaaacgccacttataaaggctaccaagatgagaaacattgaa

SEQ ID NO: 885642 - DNA, 99 bp, Homo sapiens
agctatctacgggttcagttgataaaaataagaacaaagtgacaccactgcagagctgtgtcttttgtaaagctgatgaattgttcacagagtatgaat

SEQ ID NO: 885643 - DNA, 99 bp, Homo sapiens
tcctagcgcctggcctgcgcgccgctgcccgcgccacaggttgatccaaaagactacatgttcagtggactgaaggatgaaacagtaggtcgcttacct

SEQ ID NO: 885644 - DNA, 75 bp, Homo sapiens
cctggacctatgaatatccagtttgagccatcggatctaagatccaaaagctccagtggctgttggacaattatg

SEQ ID NO: 885645 - DNA, 99 bp, Homo sapiens
ccatgattggaccatcccccaatcctctcatcttgtcctacctgaagtatgccattagttcccaggattcaggacaagctataccgcttgtagtcgaga

SEQ ID NO: 885646 - DNA, 99 bp, Homo sapiens
taacacacagaccttctctttggagtatgcgaccagtggttggaacctgaatgtgatgccagtgctagatcagtctgttctctgtcacatcaatgcaga

SEQ ID NO: 885647 - DNA, 76 bp, Homo sapiens
gcctgacctggccggctatgaggcccaggggggggccctcagcctcttggccttgaacgggctgttcatcttgatt

SEQ ID NO: 885648 - DNA, 99 bp, Homo sapiens
tgaagggaaagctgacaatcaaaaacttcctcgaatttcagcgtaaactgcagcatgatgttctgaagcttgaggacagaccagagatttgttttatga

SEQ ID NO: 885649 - DNA, 75 bp, Homo sapiens
gagaaattcagacggctcccgaggtaagactttgaccccgacgcaggcttcagtgattgccgcggatcagaagcc

SEQ ID NO: 885650 - DNA, 99 bp, Homo sapiens
gcatttacagaaagagtcaacagcagtggcaacaggagaaaatgcagaagtctccatggacgtttccctggcttaccgtgatgacgcgtttgctgagtg

SEQ ID NO: 885651 - DNA, 99 bp, Homo sapiens
tttttgttagtgataggaactcttcttttagccctactcctgactgcaaagaaaacctttccaacctatgagagaaagagatgtgaagaaagaagacgg

SEQ ID NO: 885652 - DNA, 99 bp, Homo sapiens
gaagattccccggaagcccagattcttcccttcttacgccacatgtgtcacttcattggtaagaagacaagaggtttcttctcctagaaaagaaacttc

SEQ ID NO: 885653 - DNA, 98 bp, Homo sapiens
agggattgctactgcacggtgaacctggaccaggaggaggttttcaggaccaaaattgtggaaaagtcactctgaaagcgtggatacccatcaacgaa

SEQ ID NO: 885654 - DNA, 98 bp, Homo sapiens
atccgtgtcgtgtccatggacagagactaccacgtggagtgttaccactgcgaggcagcctggcatcctcgctacaacctcattgttgtgggccgata

SEQ ID NO: 885655 - DNA, 98 bp, Homo sapiens
gccgtcctgaggagcctcctggcctgcagcttctgtgtgctcctgagagaggcggccttagcaacatgctgttccagtgctccctacctgacaccaca

SEQ ID NO: 885656 - DNA, 99 bp, Homo sapiens
agctgaagctgggcatctggggcggtctggtgagctgtaccttctttctggcagtgaatggtctgtattcctctagtgatgatgtgatcgaattaactc

SEQ ID NO: 885657 - DNA, 100 bp, Homo sapiens
cctcgaatggctgccactcagaaacttgttaaagacattattgatcagaatcaagctttgcgactctgtctgggtagcactagtgttggaggtcagtatg

SEQ ID NO: 885658 - DNA, 75 bp, Homo sapiens
gagctccctctgcttgctttccagctgccactgcagagccccgccatggaagacacgccgttggtgatatcgaag

SEQ ID NO: 885659 - DNA, 76 bp, Homo sapiens
cccagacgggcgggcagggccgggctccgcagggctcgtgcaatccgcttcagacaggatggtaacgaagccgtcg

SEQ ID NO: 885660 - DNA, 76 bp, Homo sapiens
gggtctcagcgggatctggagtcagggaagacttgcactatctgccagatgctgcttcctaaccagtgcagttatg

SEQ ID NO: 885661 - DNA, 99 bp, Homo sapiens
gtagtggctgcggcgcgggccgagaaggaaggaatgcttccggatcccaagaacactcacatcgtcatcagctggatgatcgcacagactgtcactgct

SEQ ID NO: 885662 - DNA, 99 bp, Homo sapiens
ttggcggtccctgtgacctgtggagacacggccagatctgccctccaatcatggaagggaagtggttgctgtgtatgttactggtgcttggaactgcta

SEQ ID NO: 885663 - DNA, 99 bp, Homo sapiens
ttcagcaaatgcagaatcagcccattgcaggaatgggataccaagtctcccaacaacagagacagcaccaatgttgttatgaattattcagagatcgag

SEQ ID NO: 885664 - DNA, 100 bp, Homo sapiens
cacggagaccgggctggagccggacgagctgtcgggtgccatgcctctgcaactcctcctgttgctgatcctactgggccctggcaacagcttgcagctg

SEQ ID NO: 885665 - DNA, 99 bp, Homo sapiens
agatccacatggagccaactctctgcgagtcctgtgtatggaaactcacatgagtcagctcagtctagaagggtagtaatttctcataatatggataaa

SEQ ID NO: 885666 - DNA, 99 bp, Homo sapiens
cggccggttctacatgaaggaggccatccagctcatcgctcgcatcgctgccgccaacgggatcagtgtgcgtgtgaccaccatggatgcagagctgga

SEQ ID NO: 885667 - DNA, 99 bp, Homo sapiens
cgcccatccttggacttcctgaaaatgacccagcactctcgagtggaccctgaggagctcttcaccaagctcgaccgcattggcaagggctcgtttggg

SEQ ID NO: 885668 - DNA, 99 bp, Homo sapiens
atcgttagagtcttcctgcccaacaaacagaggacagtgtgaataaccctataccttccaatttgaaatcagaagcaaaaaaggctgccaaaatattaa

SEQ ID NO: 885669 - DNA, 76 bp, Homo sapiens
gaagcctggtcaatatccgaaaggacacactgaggctcgtcaactgtgtggagctgaaccggtctgcattcctgga

SEQ ID NO: 885670 - DNA, 76 bp, Homo sapiens
agtgagaagcaagaaggccctggacacagcaatatctctgggctttcacagggtcttgcctatttgcatactaaag

SEQ ID NO: 885671 - DNA, 99 bp, Homo sapiens
gagctgagtggttgtgtggtcgcgtctcggaaaccggtagcgcttgcagcatgttttacatgtggcacccataaaagatgaggctgagaacacggaaag

SEQ ID NO: 885672 - DNA, 100 bp, Homo sapiens
aaatacaccaacctcctccagggctggcagaacaggcccgatgagagaaagggaaagttaaggatgctggagcagaacaatggatttctctttctctttc

SEQ ID NO: 885673 - DNA, 99 bp, Homo sapiens
cacacctcagaaaggagcttctgattgctgccaaacacatcctcaccacagagctgagaaaccataagaccatcatcatgtggaaactgaccagggatg

SEQ ID NO: 885674 - DNA, 76 bp, Homo sapiens
ctttgaaagaatatttggtgatccaaattctcatatggagtgtgagcagctgcagaagatgtacggggggcagatt

SEQ ID NO: 885675 - DNA, 99 bp, Homo sapiens
agctatatactttggttacctatgtacctgttaccactttcaaaatgcctgtatggagtggaatgaatgttgctggtgtctctctgaagactctgcacc

SEQ ID NO: 885676 - DNA, 98 bp, Homo sapiens
gagatttccactagagcttccaagtcattgacaacaaaaacatcaaaacggcgatccaaaaattcagtggaagctcatttagaggcgagttttgagga

SEQ ID NO: 885677 - DNA, 100 bp, Homo sapiens
agaaggactgcctcactgagcaaccaagatcaacattatgacctggggactccagcatccttcaagcaagccatttccgaagaaggtgaaaagaagccag

SEQ ID NO: 885678 - DNA, 76 bp, Homo sapiens
gaaaggagcaagagcaagatcaccgtgacatccgaggtgcctttctccaaaaggatgcagcaccgaggcttcctcc

SEQ ID NO: 885679 - DNA, 99 bp, Homo sapiens
caacaacaagccattcatgggccggttttatgagtgggaaccatttgcagaagatgtagaagacagaagtagctcagggtcctgggggaatggaggaca

SEQ ID NO: 885680 - DNA, 98 bp, Homo sapiens
agctttacaacatcctgaatcaggccacaaaactctccagattaacagaccccaactatctctgtttattggggctgaaaacacagttaaatcacttt

SEQ ID NO: 885681 - DNA, 99 bp, Homo sapiens
ggacatccggacaaagagtcaaggtggggagccaacatacaatgtggctgtcggcagagctggtagagcctatcaagactcttccacctgctacttcta

SEQ ID NO: 885682 - DNA, 99 bp, Homo sapiens
tcgaacattccgagaatgcgagagaaagagcctccgtcaccacatagttttccaacctattggtggtatgtctgacagtggatcacaacttggttcaat

SEQ ID NO: 885683 - DNA, 99 bp, Homo sapiens
gaagatggacagtttcagtgcattacagatcaacctctccacttctcctacacctgcacagttaataagccgttcccaggcttccagttctaccagcgg

SEQ ID NO: 885684 - DNA, 98 bp, Homo sapiens
atctcttgggcaatcttcacggggctggctgctctgtgtctcttccaagacacgaatgcagagtttgagtccagatcccaaagcccagtacacaagta

SEQ ID NO: 885685 - DNA, 98 bp, Homo sapiens
agaggatcagtgacttgtttgctagacaccggaccaaaatgaggcgtaagaaacgctttgcaaagcaagcaagaaagtacgactatcagcagccacaa

SEQ ID NO: 885686 - DNA, 76 bp, Homo sapiens
gcctccaccctggcaggaatcccaatttgcctccacttagtgagcggaagaatggcagatcgggagcggtgccgag

SEQ ID NO: 885687 - DNA, 99 bp, Homo sapiens
ctgcccggtgtctgcccctgaggaggtgtggcggctgatgctgagtctagggctacagccgagccgggacagctacaacctgctgttggtggcagctcg

SEQ ID NO: 885688 - DNA, 100 bp, Homo sapiens
gatgtttggtgaaacaccctcttgggacctagagcaaaaatattgccctgataatttggaggtcgtcagtgaggccacacagcagcagcatgaagtgctc

SEQ ID NO: 885689 - DNA, 99 bp, Homo sapiens
aagatcattgtgtttagtgcctgtcgaatgccccccagccaccagctcgaccacagcaagctcctgggatctaaccatgagctaccctggctatccccc

SEQ ID NO: 885690 - DNA, 99 bp, Homo sapiens
gctgtgcctcccagcaccacagtccttctgcagtccctcgtccagccacccccaggccccatcacaggtatatggaggagtgacctactataaccccgc

SEQ ID NO: 885691 - DNA, 99 bp, Homo sapiens
gctgtacaataggattttactgtcgaaatgttcaggacttcaaacgagcttctgaagaaatcaccaagttccacaaggagagattcaaaattgacatgc

SEQ ID NO: 885692 - DNA, 98 bp, Homo sapiens
tcctccaagaaccaacccccaaattggctgggacagtaacaatgcgtcagtttgaccatcctcatattgtgaagctgattggagtcatcacagagaat

SEQ ID NO: 885693 - DNA, 98 bp, Homo sapiens
ttcgattgaagcacatcgaccggcgacagcagccaggagtcatgagcgacagcggcgagcagaactacggcgagcggcctcctgaggaggtgtactcg

SEQ ID NO: 885694 - DNA, 98 bp, Homo sapiens
gaggccctgcctatgaccagcaagaggatggggccctggatgagggggaagggcctcaaagccagaagcccattgcagatgcaaaggctcctgagaag

SEQ ID NO: 885695 - DNA, 100 bp, Homo sapiens
atcaccgagttcttgaccacgatttgcccaagaaaccaggcccaaccattttgcactttgctgtgaggtacaagggatttaaaggcaactgttccatgac

SEQ ID NO: 885696 - DNA, 98 bp, Homo sapiens
gagaccccaacaccccactgttgcaaggtactccaaagattcaggtttactcacgtcatccagcagagaatggaaagtcaaatttcctgaattgctat

SEQ ID NO: 885697 - DNA, 75 bp, Homo sapiens
ctcagtgcctatttctatctatcgttcccctgtttcccttcgaggaggacacgacacgatgaggcgagtggtacg

SEQ ID NO: 885698 - DNA, 99 bp, Homo sapiens
tcaggacacagcatggacatgagggtccccgctcagctcctggggctcctgctgctctggctcccagatgccaagtgacaagaccattgggggaggaga

SEQ ID NO: 885699 - DNA, 99 bp, Homo sapiens
agtcaagtgtttgagattgcacttaaacggaacttgcctgtgaatttcgaggagcgggctgcagatgacagcaaagaggttgagagcttccagcagctg

SEQ ID NO: 885700 - DNA, 76 bp, Homo sapiens
cacaaaggtgcccatcaagcgctcagctattgacctgttgtattggcgggacatcaagcagacgggcatcgtgttt

SEQ ID NO: 885701 - DNA, 99 bp, Homo sapiens
aatgtctatggtgaagtcttttgtacagtggttagactactccagtggttttggcggcaagtatggcgtgcaggccgaccgagtagacaagagcgcggt

SEQ ID NO: 885702 - DNA, 98 bp, Homo sapiens
ctccaggaatgggacctcgagtcactgtggaagatgagaatgtgcctactgctcctgatcctccaagtcaacatttacgtgggcatgggacaggcttt

SEQ ID NO: 885703 - DNA, 99 bp, Homo sapiens
ttccagcgctgcgcccggacagacaagaacggcatcatcactggcgtgtacccggcaagcccctccagttggcttatcgtggtggtgggcgtgatgaca

SEQ ID NO: 885704 - DNA, 99 bp, Homo sapiens
cagcacagttcctgggaaggtggagccaccagcctctccttgtctgttctctggggaggcagtaaggggccgtggagctggcctcggcctcggcatcgg

SEQ ID NO: 885705 - DNA, 98 bp, Homo sapiens
gctgctcatcatcggcgacagcgacttaattcagtgcacaaatgagatgaatgtgaacatcccacagttggcagacagtttatttgaaagaactacta

SEQ ID NO: 885706 - DNA, 99 bp, Homo sapiens
aagagctggaaatggtccgtgatcatctaaatgctttcctgaatcaggaaacccaggcccaacggcaggtggatgcaagaagaaatgttccccaaaacg

SEQ ID NO: 885707 - DNA, 76 bp, Homo sapiens
agccattgaagggaacaacacccttgatggtgggtcatgataactgggtacgtggagttctgttccattctggggg

SEQ ID NO: 885708 - DNA, 99 bp, Homo sapiens
aagataaagcccttaaggacaaggtggtttgtgatgaaaatggttccaagggctatggatttgtacactttgagacgcaggaagcagctgaaagagcta

SEQ ID NO: 885709 - DNA, 99 bp, Homo sapiens
gagaacagccctccatcttgcagcccagaaggatatcttgctgtggcggtggttaggagatcagacactagccttacctggaactctgtgaaaggcaag

SEQ ID NO: 885710 - DNA, 98 bp, Homo sapiens
gagccccaggacaaagaatgccccatcactgccctccagaacatgctacaaaactgctccaggaagcgctatagaaatgaagggagtcccagccctag

SEQ ID NO: 885711 - DNA, 98 bp, Homo sapiens
cctcttgagtgctttggacgatcttcagctggccaacagcaccatcattgcatttacctcggatcatggcaactccaatgaaatagacatcgtgcatc

SEQ ID NO: 885712 - DNA, 76 bp, Homo sapiens
cgtaaattctactggagagcatacggaattttctgggggcttcgtgggacacatatgcaacatgcctatgattttt

SEQ ID NO: 885713 - DNA, 98 bp, Homo sapiens
gctgctgtcttcaatgctgttaactggattgagtccagctcttgggatggtggtgaagcagtattttccaatttgaagattcatttgaaggtggctcc

SEQ ID NO: 885714 - DNA, 98 bp, Homo sapiens
ttaaggacattgtggcaatcatcctgaatgaatttagagccaaactgtccaaggctttggcaccctacctgaacccatccttccatccctccaaaaaa

SEQ ID NO: 885715 - DNA, 98 bp, Homo sapiens
gagcgcagatcggcgcccagcaatcacagaagccgacaaggcgttcaagcgaaaacatgaccgctgagcccatgagttacatgggaataggactctcg

SEQ ID NO: 885716 - DNA, 99 bp, Homo sapiens
tgaggcacccggacctcgtcaggccgctgcagatgaccattccagggccgcgatgggcctcttggaacattggtgtgttcatctgcattcgatgtgctg

SEQ ID NO: 885717 - DNA, 99 bp, Homo sapiens
tggcttactgtgcaaaccatccttcagctgtaaatgtgctcactcagcacagacacaagtgagatcagagcctagcaacatgcagtttttcttgatgaa

SEQ ID NO: 885718 - DNA, 99 bp, Homo sapiens
agagtccccccaagtctcctgaagaggaaggagcggtgtcctcttaagaaaatgctattgtgaataatgctgctatgaacacgggtataccactatctc

SEQ ID NO: 885719 - DNA, 98 bp, Homo sapiens
tccaggacacccctgaagccgagaaatggaaaatgtctaatcaacaggagaagtatgaagctcagaatatagtcaattcaacagaagagagtgatgat

SEQ ID NO: 885720 - DNA, 99 bp, Homo sapiens
tttcagggaacattaactaatgaaaccagatgtcttacttgtgaaactgaccgaggtgatgagttcacatacactggaagcggtggtaaaaatcttgct

SEQ ID NO: 885721 - DNA, 99 bp, Homo sapiens
gcagaaacgatggcggaggaagaagctttaccactcctgaaggccctaaaccccgttccagatgctctgactgggcaagtgcagttgaagaagatgaaa

SEQ ID NO: 885722 - DNA, 98 bp, Homo sapiens
ccccgacctttgatgagaactcagctgtccaggtgacccgttgcctgcccgccaggaaggtgtgaagaagaaggcagctgagtacctgaagcgggcag

SEQ ID NO: 885723 - DNA, 76 bp, Homo sapiens
tgactagtaatggagaagttgatgactctcgtgaacatagctttaatagggagatgacttacagtctcttctgttt

SEQ ID NO: 885724 - DNA, 98 bp, Homo sapiens
ctcaaatgttatctgggaaattaaagttctacgtaaagagagtatggagctcgtaaaattacaaatgaagaaacacccctgccgccagtgtgacaagt

SEQ ID NO: 885725 - DNA, 99 bp, Homo sapiens
ctacctgcactttggggagcctaagtcctgatcgccggggagtggcctgtacagcaacctccagcagtacgatctcccgtaccccgaggccatttttga

SEQ ID NO: 885726 - DNA, 100 bp, Homo sapiens
ctgttcctgaacggcagccccaagaacggaaaggctgaagccgacgtagcttctctgaacagacgcatccagctggttgaggaagagttggatcgtgccc

SEQ ID NO: 885727 - DNA, 99 bp, Homo sapiens
agcctcctgagtagctgtgattacaggttcatcgggattaggcagccctcttggccgaagtcgacatagtagtagtcagtcagacctgaccagttccag

SEQ ID NO: 885728 - DNA, 76 bp, Homo sapiens
ggtctacgagctgtttctcatctttatactcttccagggtgagaactctgtctcagtcgacgggaagtgcagtgac

SEQ ID NO: 885729 - DNA, 99 bp, Homo sapiens
ggctgccgagaaggagggaggggaaacacaaagccggctacgcgctgcgaggtagttacttttggtgacgctgtccagttcccacaatgtatcattcct

SEQ ID NO: 885730 - DNA, 99 bp, Homo sapiens
gaatgtcagttcccgggtacagtcaactgcatttttctctggtgaccaagcttccactgacaaggaagtggctgccaaatgtttggtgatgaaggcaga

SEQ ID NO: 885731 - DNA, 100 bp, Homo sapiens
tgcatatcagagatattacagtttacaggctgactactggaaggtttaccgacaagactgtgaaactttcgggatggtggtgaaaatgctgattgaaaaa

SEQ ID NO: 885732 - DNA, 76 bp, Homo sapiens
caggacgagaggatgcggagcccgcagaacctccacagtcaagaggacggttatgaagacagtatggagtttccag

SEQ ID NO: 885733 - DNA, 99 bp, Homo sapiens
cggaacgctgctgtctggagggggcggcgcggcaggagcgcgttgagggactgtaccccctgtaccggctgggtggcccacaacttcgggtgttccgaa

SEQ ID NO: 885734 - DNA, 75 bp, Homo sapiens
caaaaggcaaattgcaaaccataaggatgtttcgttccctgacactgccctctcggtgccaccagtgtgtgattg

SEQ ID NO: 885735 - DNA, 99 bp, Homo sapiens
aacgaattatctggcccctggggggctttcagattaactgctgaagtactgatcgagttctgcatttcttcaatgaggaactacaggctgatcttctgc

SEQ ID NO: 885736 - DNA, 99 bp, Homo sapiens
tctcattccatcttcattcatgactccagacaggcaatttgaatcaacccatagaagtgacagcgctgtattcatttgaaggacagcagcctggggatt

SEQ ID NO: 885737 - DNA, 99 bp, Homo sapiens
ggcatcatctcttaatcctcagaacatcccagggagatgaatggaccaggtagtttgtttgcttcagagaatttcctgggaatttcaagtcagcctaga

SEQ ID NO: 885738 - DNA, 98 bp, Homo sapiens
tctcctcctttgacagggacatcagtggagccttctcagacccacagctggcccccaagaggaccctttccaagtccccagctgggggccctgtgtag

SEQ ID NO: 885739 - DNA, 98 bp, Homo sapiens
tctgggctctgcctcaccacttgtctcagagttgtacaatggtagatggagtgatgattcttcctgtgcttatcatgattgctctcccctcccctagt

SEQ ID NO: 885740 - DNA, 98 bp, Homo sapiens
aaagctcctaattctattacccactacatgacatgtgggccaagtgaaacctctgtagaggagcaggatgcaaccgacaggctgtggccggacagctg

SEQ ID NO: 885741 - DNA, 100 bp, Homo sapiens
caaggggctcctgcaactccccagcagcacgtgttggaatggacttcggaccctggcctcttgggatgcaaagctggagcagagtgaagccaagtgtgag

SEQ ID NO: 885742 - DNA, 99 bp, Homo sapiens
ggaaacatcagcatatgcatgaccgagatgacctctatgctgagcagatgggcttccccaaggatttattgacattgctacttgagtgtgaacagttac

SEQ ID NO: 885743 - DNA, 99 bp, Homo sapiens
gtcagctgtctcagtttggggcaagtttatacgggcaacaaagtgagttgggaatcagactcttgagttgacagctggcctatggtttctgcattttgt

SEQ ID NO: 885744 - DNA, 99 bp, Homo sapiens
catgagcggcggcggcgacgtggtgtgcaccggctggctgaggaaatcgcctcccgagaagaagttgaggcgctatcagaaacactatggagtgttctg

SEQ ID NO: 885745 - DNA, 98 bp, Homo sapiens
tggtctacaagactctcttcgctctttgcatcttaactgcaggctcttgcagccaatgccggaacaggatttgctgttgctgagcctcaaatcgcaat

SEQ ID NO: 885746 - DNA, 76 bp, Homo sapiens
tggcgctgcctcaaggctgctgagcagacctgccatgaagaaaattatgaggctttccatctgatggtcccctggt

SEQ ID NO: 885747 - DNA, 98 bp, Homo sapiens
gcagccattgagattatacggaaccagaagcagattgccaacattgaccgtattacaaagtcctcagaatggttggaatgaccctccagctttgaaca

SEQ ID NO: 885748 - DNA, 98 bp, Homo sapiens
ctacatctggattgtagccataagtggacttaatcagcattcgagcttttacacagctctttgatgaggacctgaaggaattcacaaagccactctat

SEQ ID NO: 885749 - DNA, 98 bp, Homo sapiens
tctcctgccaagcagcaggccccacctgtccggaacctgcaccagtctggattcagtttgtctgttgctgacaggtggaacctgaggcagcaggacag

SEQ ID NO: 885750 - DNA, 99 bp, Homo sapiens
ttcacttccctcggtctgggcttctctgaggcggcgagagatggtcaggtctggagctcgaccgggccagggttatgaagactggcttcgacataaagc

SEQ ID NO: 885751 - DNA, 99 bp, Homo sapiens
agtgactctgcacccagcaatccctctgcagacagctcccacaggagtcatgcccagtgtgtgaagacgcaaaatgatttcatggttatctgcaatgtt

SEQ ID NO: 885752 - DNA, 98 bp, Homo sapiens
ttcagtcggagccagtaaagcatgaaacttccagaaatccttggaaagatgtccttttctgagaagaatctgaaggctttattgaagcactttgatct

SEQ ID NO: 885753 - DNA, 76 bp, Homo sapiens
gttttacataatctgaaggatcgctactattcaggactaatctataagagaagccagattgctccaaggcccgctg

SEQ ID NO: 885754 - DNA, 98 bp, Homo sapiens
gccgtcaggcactgaggaggccgagagatgaggccggagcccaccaagttctgggaaactgaaatcgccaagagattgaatacgatttgtgcacaagt

SEQ ID NO: 885755 - DNA, 98 bp, Homo sapiens
tcctcgcgctgcaaggatgctcctgggatttcggagaggccgcaggagtcatttcgaatttgtaagtgtctgggttcgagatcctaggattcagaagg

SEQ ID NO: 885756 - DNA, 76 bp, Homo sapiens
tctacaccgccttgaaaaaaggaaaggttatggaggttttgatgactatggtggctataataattacggctatggg

SEQ ID NO: 885757 - DNA, 100 bp, Homo sapiens
gagggatactcccatgctgccaaagaagaagtaccgtcagcatccagatgctttgaagtttaccagtattaaagacactccggagatggtccaggccaga

SEQ ID NO: 885758 - DNA, 98 bp, Homo sapiens
gcgatgtcagctcagtgctgtgcgggccagttctcttgcaactagcaagtgaagccttgccaaatgacatgaccttggctcttgcttaccttcttgcc

SEQ ID NO: 885759 - DNA, 98 bp, Homo sapiens
attagctgaaaacatcatcgttttgaagagttctgcgttttgccagtcacctctcaactgtgtgccaaaggagcctgcagacagggggatttgcctgg

SEQ ID NO: 885760 - DNA, 100 bp, Homo sapiens
attttcgttggtggtgttcagttgtggcggttgctggtcagtaacagccaagatgctgcggaatctgctggcaacagcattattgagaaaagcccttaca

SEQ ID NO: 885761 - DNA, 99 bp, Homo sapiens
acggagcaacccatggttctggagaaaacagcgagtcttatgctaaaggaagctgtttcctatattgaaaggaagccagcagacctgcagaacttggct

SEQ ID NO: 885762 - DNA, 76 bp, Homo sapiens
ttcatgtgtctgtggcagtcttgtaaaaaaggtttttcattagtcaatacagtgaaggctggcatgatcatcagct

SEQ ID NO: 885763 - DNA, 100 bp, Homo sapiens
aaaatacttgctggatggtggactcagagaccaataaaaataaactgcttgaacatcctttgactggttagccaggatgttggcaaaggatgaactgatg

SEQ ID NO: 885764 - DNA, 99 bp, Homo sapiens
tgatgtcagttccatttcggctttaactcagaaactctgccatgtcgtgaaggtggtgtcagcaaaagcacaacatctggggaggagctagtagtccag

SEQ ID NO: 885765 - DNA, 99 bp, Homo sapiens
agaagtggaagaagaccaagacccatcatgccccagccttcctcttcgcttctgggtaaacatcctgaagaaccctcagtttgtctttgacattaagaa

SEQ ID NO: 885766 - DNA, 99 bp, Homo sapiens
tcagcactgactttcagctatggaatcgaaagatgtgcgggacatcctcaccccaattcagattgaagctgcttaccaccttggtcctcatgtcatcag

SEQ ID NO: 885767 - DNA, 99 bp, Homo sapiens
aaataaggacaaaagccaagaggaggacagttcgctacacagcaatgcatcgagtaatccttcccctctaccaccggatatggctcctgggcagagtta

SEQ ID NO: 885768 - DNA, 99 bp, Homo sapiens
cttcatccagtttgctacggtctacggggcagagcagtcattgaagtcaacaagagagacatagtcttcctggtggatggctcatctgcactgggactg

SEQ ID NO: 885769 - DNA, 99 bp, Homo sapiens
gccgatatggaacccaagcagtggcgaagggaatcgcaaggctcttccctgaccattttctactgtccctgcgcgaggaactatgaaaatttggtagac

SEQ ID NO: 885770 - DNA, 99 bp, Homo sapiens
tcgcccctcgggccgacgccatgaagatcaaagatgccaagaaaccctgagacaaggagaaggccttaggatctactgggggagtccggaggagcagtc

SEQ ID NO: 885771 - DNA, 100 bp, Homo sapiens
ctgaagcgcccgtccattccaagatgcctgtgaggagccaccaacatttgaagctatggagctcattggtaaaccaaaaccctactatgagattggtgaa

SEQ ID NO: 885772 - DNA, 98 bp, Homo sapiens
cggattcctccagttccaggagaagtgaaaacttttggcccgtttggaagcggcagccaggacaacctgactatgtacatggatttagtggacggcat

SEQ ID NO: 885773 - DNA, 99 bp, Homo sapiens
cagtgggagtcgaagcgagggtctgaagttcacgactactagaaggggaggggagtggaaaggctctcagtgaaaaagcgatgtgcattttgtaagcac

SEQ ID NO: 885774 - DNA, 98 bp, Homo sapiens
tcagcatgccagggtcatcccgtccagtctctgatcgaaggggagtttccacagtgattgatgctgcctcagaccattcctcaagaattttgtatcca

SEQ ID NO: 885775 - DNA, 99 bp, Homo sapiens
cagtggttcaagtgtgacgatgccatcatcaccaaggccagcatcaaggacgtcctggacagcgaaggaaatgagccgtcagactgctacagcattacc

SEQ ID NO: 885776 - DNA, 99 bp, Homo sapiens
ggccctgggcctcattcgcttcccgctcatgaccatcgaggagttcgctgcagcctgtgactgcggtgcccgcctctgtgacgagctcacgggccagtg

SEQ ID NO: 885777 - DNA, 100 bp, Homo sapiens
agatccggaagaaatatccggacagggtccccagatcgagatggtgatcatggagcgtagcaagctctcagagctggccgccagcacctccgtgcaggag

SEQ ID NO: 885778 - DNA, 98 bp, Homo sapiens
caacggccaacttcggcaagatccagatcgggatttacgtggagatcaagcgcagcgatgacaagttggatggcttgaggactggtactaaaaggaaa

SEQ ID NO: 885779 - DNA, 98 bp, Homo sapiens
tcctccgaggtggcgcggcacctgaaatgtctttcctccaggacccaagtttcttcaccatggggatgtggtccattggtgcaggagccctgggggct

SEQ ID NO: 885780 - DNA, 98 bp, Homo sapiens
ggaattaagaaaacagagcgacgagcaagaagcagcccaaagtcgaatgattcagacttgcaaggttatgatggagggtggtcgcagcaaagggtttg

SEQ ID NO: 885781 - DNA, 99 bp, Homo sapiens
tcatcaaaaacagatcagtagtttgagagatgaagtagaagcaaaagcaaaacttattactgatcttcaagagtttactcctggcttgggggcattagg

SEQ ID NO: 885782 - DNA, 100 bp, Homo sapiens
cgcaactacgctccgctccgcgggccaagaaactggagaaactcggagtgtactccgcctgcaagaacgagcctctgactccaggttatcatggattccc

SEQ ID NO: 885783 - DNA, 76 bp, Homo sapiens
gaaaactcagcttggtgactgcactgtagcaacccaggcctcagccaaaactggacaagccaaggcatctgtagcc

SEQ ID NO: 885784 - DNA, 100 bp, Homo sapiens
ttctaagaaggtcaccattgactttgcaggaaggaagatcctggaagaagaaaattcactagcagagtatcatagcaggccatcccagggattagcgaag

SEQ ID NO: 885785 - DNA, 98 bp, Homo sapiens
tcgtttttacccggccaaagtcactgctgttaacaaggatgctctgctgtgtgcgtgcaccagctgcctccaggccaactacacgtgtgagacagatg

SEQ ID NO: 885786 - DNA, 99 bp, Homo sapiens
cctctcagtcaacatctccttcgcagccgcgcaaaaaaaaggagctctacggtgactttgaagacttggaaacaggggacgtgcacaagggaaaatcag

SEQ ID NO: 885787 - DNA, 99 bp, Homo sapiens
gctgaggcaggcagatcacgaggggctgataggatgtcttcatttggtgattttgttgcattgtccgatgtttgtgatgtaccaactgcaaaaattatt

SEQ ID NO: 885788 - DNA, 76 bp, Homo sapiens
cagcagactcggacgtggacgcctttttccggacagttgttgacctcctgtactggagagacattaagaagactgg

SEQ ID NO: 885789 - DNA, 99 bp, Homo sapiens
tcgcgctgtgctgggcgccccgggagagcggcgccaccggaaccggttgctgcttttgctcagaggacatccatgaccctaatggtctttttgttcaag

SEQ ID NO: 885790 - DNA, 99 bp, Homo sapiens
aaggggcattatcccgctggatgcacactgctgcgtggaggtccttgaatgggcaagagggcacatgaagtacggcgtcctccacattcacggcctcta

SEQ ID NO: 885791 - DNA, 99 bp, Homo sapiens
tgaggcggaggctgacgaggaggcggatcccccggcgtcagctgagatctgtatctgtggacctgaatgttgatccctcgcttcagattgacatacctg

SEQ ID NO: 885792 - DNA, 99 bp, Homo sapiens
cggcagcgggggcagtcagagcggagccaagatgcgaatggggttgtggcagcactgcctgaaggtatgagaccagattctaatctttatggttttcca

SEQ ID NO: 885793 - DNA, 75 bp, Homo sapiens
ctcagcctacgggagaagcaggaggaggtccggagactgcagcagggatcccaatgagccccgagaccccaaggc

SEQ ID NO: 885794 - DNA, 98 bp, Homo sapiens
tttctcttggatttggctacacacttatagatcttctgcactgtttacaggcacagggcaaatccagacagaacctttgacttggtgttgaaagtgaa

SEQ ID NO: 885795 - DNA, 74 bp, Homo sapiens
ctgacatgacaaggagccgtcgtcgttagctcctctggtgcaagtgtggtagctattgacaacaaaatcgagca

SEQ ID NO: 885796 - DNA, 98 bp, Homo sapiens
gggcaacgacggcgacaggaaacaggtcatcatcagatttgaaatatttaaagtggatacaaaactatttcagcaatgcagacaattaagtgtgttgt

SEQ ID NO: 885797 - DNA, 99 bp, Homo sapiens
tcaccatcaaaattgcaccaaacacacctcagctggctgacattgttgcaacagggtttcgtagcttaacgacagcgttcttcagagatgctatgggtt

SEQ ID NO: 885798 - DNA, 99 bp, Homo sapiens
caaagggaggcattgtccgaactgggactcatggactgcttgtgaagcaggaagacagtggggccatgagagcgctgtacgcctacagcccgctggaag

SEQ ID NO: 885799 - DNA, 98 bp, Homo sapiens
ggcgcgggccgaccgggcgcaccgaccatggcctccaaatgccccaagtgcgacaagaccgtgtacttcgcttcatggcggctgaagagatgcattgg

SEQ ID NO: 885800 - DNA, 99 bp, Homo sapiens
ggggcagcttggagatgtcgtcggatggggaacccctgagccgcatggactcggaggacaggtttgcagctaaaactgtgcacagtgggtcattgatgc

SEQ ID NO: 885801 - DNA, 98 bp, Homo sapiens
tttcctctcacctgggttttcttagccctctacttttcaagacaccaagtgagaggccaaccaggtgtcttcaaaaacaaacatatttaaaagatttt

SEQ ID NO: 885802 - DNA, 75 bp, Homo sapiens
ggatcccttgatgccaagagttcgagaccagctggggcaacaaaggccgagccacgtgtccatgcagcagacggc

SEQ ID NO: 885803 - DNA, 98 bp, Homo sapiens
gattatgaaggcatcaaggctaaaattgcaaatgcatatatcatcaaggagcattttgagatttggaacattgctaccaataaactgacgttcttgaa

SEQ ID NO: 885804 - DNA, 99 bp, Homo sapiens
taaacttccttttactattagcccatcaagaaatgaagaacgagattcagacacagaacattctagtatgccagtagaaaaaaatatcactttagaaag

SEQ ID NO: 885805 - DNA, 98 bp, Homo sapiens
tttgagccatcggatctaagatccaaaagtcatgcggaggaatccctttggtgtggacatctgctgccggaaggggtcccgaagccccctgcaggaac

SEQ ID NO: 885806 - DNA, 99 bp, Homo sapiens
gctcccggagtgtatgtctttggagaacttctggagctggccaacgtgcaggaggagttaagggagcatggagaaaagaagaaacgctcgcgagaggat

SEQ ID NO: 885807 - DNA, 98 bp, Homo sapiens
gagtgggaggatgcgcaggggttttctgcacttctacactcaggcgacactaacaggtgaagatctcgggagaccatgactaagaaaagaattgctgt

SEQ ID NO: 885808 - DNA, 99 bp, Homo sapiens
ggacgctgctgcagcacctgcgccaggtgaatgaaatcctgtgccgttcttcagtctggagtgccttcaaagatcagaaacatgatttgttcatttctg

SEQ ID NO: 885809 - DNA, 98 bp, Homo sapiens
tacaatctaaagtggactgcattttgatgccagaggaacaagcattctgtgttttggtgaaaatcatgtacgactatggtttgagagacctctacaga

SEQ ID NO: 885810 - DNA, 98 bp, Homo sapiens
ggacacacctccattggatttaaaagacagtcctcgtcagcactgactttcagctatggaatcgatgagcgtgaagccgtgcagaagaagaccttcac

SEQ ID NO: 885811 - DNA, 99 bp, Homo sapiens
tgtactgccggcacctcaaccagatgaggaagtacaactttgagggtttaatgaagaaattcattcgatgttctacacgtgtaactgtgggaactatta

SEQ ID NO: 885812 - DNA, 99 bp, Homo sapiens
agcagatggcggatgccctgcagtacctgcagaaggtctctggagacatcttcagcaggacctgagggcactcgctttgctcctgtcagtacacactcc

SEQ ID NO: 885813 - DNA, 98 bp, Homo sapiens
aaggcccagcagcaaaaagcctgcatcagagctcccattgaccacgggttggaacagctggagacatgatcttcagctctgtaaatgccatccttgat

SEQ ID NO: 885814 - DNA, 99 bp, Homo sapiens
agaaagggagcgacaagagcagttagaaagggaacagctggaatgggagagagagcgcagaatatcaagtgctgcactgaacctaccagatgtatttgg

SEQ ID NO: 885815 - DNA, 98 bp, Homo sapiens
gaatgtggggctcccagaccttcaaaccaaagggccaatacctggatatggttctggttatgatgtgattgctcaagcccaatctgggactgggaaaa

SEQ ID NO: 885816 - DNA, 99 bp, Homo sapiens
agcgatcctcccaccacctcagcctcctgagtagctggaaccatcatatgcaccagcacgcctggctaattccatgccattgcagtgtcaactaggcct

SEQ ID NO: 885817 - DNA, 98 bp, Homo sapiens
aaataaatattcacgagtactaccttgggaatatgttggccaagaaccttctatttgaaaaagaacagctgaatagatttgctggatttggtattgga

SEQ ID NO: 885818 - DNA, 76 bp, Homo sapiens
cccggacatcctggaagctgggaaatggcatctctgggaaaggacctggggctggtgaggggcccggaggagcctt

SEQ ID NO: 885819 - DNA, 75 bp, Homo sapiens
tgttcacgagaacattgagacatttctttcggtgggtcatgataactgggtacgtggagttctgttccattctgg

SEQ ID NO: 885820 - DNA, 99 bp, Homo sapiens
tgtgaacaagatgaagaaggaagggaagctgatcatgggcattggtcaccgagtgaagtcgaggagaggagacgccgtgagcgggacgaccagatgtac

SEQ ID NO: 885821 - DNA, 76 bp, Homo sapiens
ttttgaagcaccctaatattgatacgatgaatggattaaagcagataaaatagtaagacctgctgataaaaatgtg

SEQ ID NO: 885822 - DNA, 75 bp, Homo sapiens
cgacgcagaagagtccaccaccggacagccagcagcgaggagagcgtgacagccagacccaggccatcctcacca

SEQ ID NO: 885823 - DNA, 99 bp, Homo sapiens
tttgttaaggattccaagtaactcttatttgccccactgtgttctccttgcctcaaaagaaaactcggcacctgttaaacttggaggctttggggtagc

SEQ ID NO: 885824 - DNA, 76 bp, Homo sapiens
ctggcttccctcactggactcgaggggtacaactcacgaatcccttctacagtatctggactacagacattggaac

SEQ ID NO: 885825 - DNA, 99 bp, Homo sapiens
acacagtgccagagtgtatgcactttactacaaagatggacttctctgtacaggatgttcacggaagaccagggtgtagatgacaggctgctctatgac

SEQ ID NO: 885826 - DNA, 99 bp, Homo sapiens
atggagccgctggggtcccttttgcctcagatactattttgaaggtagacgttacatccaagaggaaataatccaggcaaggaagcacaagctgatcaa

SEQ ID NO: 885827 - DNA, 75 bp, Homo sapiens
gaaaattagagtgaatgtagttgcaccagaatgcctaccgcaggaatgggatggcttttctagcctgctgatgtg

SEQ ID NO: 885828 - DNA, 76 bp, Homo sapiens
aatgttcttaacccagaagtagctgaatgtgttactccattgctgaggagtgttctgccaaggaaagagaaaatac

SEQ ID NO: 885829 - DNA, 98 bp, Homo sapiens
aagattatttacaatgctaccctgctttttctggtgtcctgaacctggaagttgtgctttttaaggtaacagttaacctcttccacatgcagcatctg

SEQ ID NO: 885830 - DNA, 98 bp, Homo sapiens
tgcgctcgcgcccggatccctcagtttttggctttcacccccaaccagtgaccaaagacttgaccactcaaagtccagctccccagaacactgctcga

SEQ ID NO: 885831 - DNA, 99 bp, Homo sapiens
tgacgccacattaaccctttcattttgtttggaagatggaccaaagcgatacacaagatgatgaagtgacgactgttcaggttaaagagcaagaccaga

SEQ ID NO: 885832 - DNA, 99 bp, Homo sapiens
agaacaggaggtggtagagggcatggatatctctactcgctccaaaggagcagtgaggagaatgaataccttccaagaccagagtggcagctccagtaa

SEQ ID NO: 885833 - DNA, 98 bp, Homo sapiens
gggcggcgacggcgcagtgcgaagcgaaacaggtattgtcttctaagaactctgaagcaatgtcagacattgagggaagctctcattgctgcaggaaa

SEQ ID NO: 885834 - DNA, 98 bp, Homo sapiens
tttgtggatcgctgtgatcgtcacttgttggttgaatctggcgatgtggaacccatggatatggagggctgactatatacaccatgttttttcctggc

SEQ ID NO: 885835 - DNA, 99 bp, Homo sapiens
ctagtggttatttaatggaccttataaattttttgagaagcatctttcaagtgtttactcatttgcctagctttatggatattggaacattgatatggg

SEQ ID NO: 885836 - DNA, 98 bp, Homo sapiens
ggcggcagagcagggcggcggcgactcgatttctacctggacaaggactggtactatacccacagataggagacaaattggatattatttgccccaaa

SEQ ID NO: 885837 - DNA, 98 bp, Homo sapiens
cagattctgccaattcgttttcaggagcatctccaggcctcgaaaaagcccaagacagcagaagcagacacctccagtgaactagcaaagaaaagcaa

SEQ ID NO: 885838 - DNA, 98 bp, Homo sapiens
agacctcccggctcgacaggcggcgcgggcggcgcatatcccagtagaatacgggcttttccagggcaggaacctttagctggtttgctggttggtgg

SEQ ID NO: 885839 - DNA, 99 bp, Homo sapiens
agacttcgtgctgatggacaccgtctccatgcccgagttcatggccaacctcaggctcaggctggacgtaaagaaagaagtgatgcactcaattctgca

SEQ ID NO: 885840 - DNA, 98 bp, Homo sapiens
atttgcttgacttgattaagcaacccaaagtattcttggatccccatcacaagaagacctgaattgtataataaatttaaaagctaggaactatttgc

SEQ ID NO: 885841 - DNA, 75 bp, Homo sapiens
ggttgacttgacagcagtggacgtcccaactcggcaaaaccgttttgagatgtcttgtggcttcaagcactcagc

SEQ ID NO: 885842 - DNA, 99 bp, Homo sapiens
ggctgtcctggccaacctgctgctggaggaggataacaagttttgtgcagattgccagtctaaagaacaagcgggagcctgtgtcaggaaagcatgtca

SEQ ID NO: 885843 - DNA, 98 bp, Homo sapiens
ctgcctcagcttcccgaggagctgggattacaggactctcacagaaggaggaagaggaggacacttttattgaagaacaacaactagaagaagagaag

SEQ ID NO: 885844 - DNA, 99 bp, Homo sapiens
ccagaacaaagcattgccagaaaacgttaaggtggaatatgtgatcaagtgtgacatgtcagctctgcagaagattctgtatcgccatatgcaagccaa

SEQ ID NO: 885845 - DNA, 98 bp, Homo sapiens
taacacacgctacctctttctgggtgactatgtggacagaggctatttcagtatagagaattttccagttcatatgaagaggtgatctctcaaataaa

SEQ ID NO: 885846 - DNA, 99 bp, Homo sapiens
ataaagtcagatcttgtgaatgaagaagcaaccggacagttccatgtataccaccaagatcactccatggatgaaatgacagctgtggtgaaaattgaa

SEQ ID NO: 885847 - DNA, 99 bp, Homo sapiens
gcgggcagcaggatggtggtggatgcggccaactccaatgggcctttccagcccgtggtccttctccatattcgagggaaggtggccatccagaaggag

SEQ ID NO: 885848 - DNA, 76 bp, Homo sapiens
aaacatgtcggatgaagagaaacaggcaaatcctgatcctaactgttgtcttggagtatttgggctgagcttgtac

SEQ ID NO: 885849 - DNA, 76 bp, Homo sapiens
caaggagctcatcaaggacgggaagtcactcataagcgcgctcaagattatgcagaaggggttaaaagataacttt

SEQ ID NO: 885850 - DNA, 98 bp, Homo sapiens
taaagagttttctgtcctccttgtttgcacggagcagcaaacgcagagacaaaagaaacgggccccgactggtcaccatggctgttattggctccctt

SEQ ID NO: 885851 - DNA, 99 bp, Homo sapiens
tggaattttgccgatttcatgactaaccagtcaggacagaaggagcaagctgtggaatggtataagaaaggtattgaagaactggaaaaaggaatagct

SEQ ID NO: 885852 - DNA, 98 bp, Homo sapiens
aactgggtcccttgaagaatctacagatgagtctgagcagaaaaagtcctacctggagcgaagcgttaaggaagctgaggacaacatccgggagatgc

SEQ ID NO: 885853 - DNA, 76 bp, Homo sapiens
gaaatgattctccagaatttctcctcataaaaaagatggcaccaaaagcgaaggaagctcctgctcatcctaaagc

SEQ ID NO: 885854 - DNA, 100 bp, Homo sapiens
atggggtgatcgctctcaactaactacaattgtattggcagctagagaggatgttttcactccagaatgcaaattcaaggaatctgtgtttgaaaactac

SEQ ID NO: 885855 - DNA, 76 bp, Homo sapiens
cctcactgttcaggccctgtctgtgtactctgcctctaacctgcttgtgctgctcaatgacgggatcctacggaag

SEQ ID NO: 885856 - DNA, 100 bp, Homo sapiens
acgagatccagttcctgcgaactagtcctgtgaagataaatcagattagcttggatgaaagtggagagcacatgggtgtgtgttcagaggatggcaaggt

SEQ ID NO: 885857 - DNA, 76 bp, Homo sapiens
catgaaagagattccttgcagagacagctcaacacggcacttccacaggtggtgatctttgtgaagtctgtgcagc

SEQ ID NO: 885858 - DNA, 99 bp, Homo sapiens
cctgctggggctcgccgtcaacgtggtcaccacgctcgtgctcatctcctactgtcccacggccaccgaagaggaaagtgactattttaccccacaggg

SEQ ID NO: 885859 - DNA, 99 bp, Homo sapiens
agaagtccagagctgaggactgcctgtttgcagcgtttagtgggctacagatggcatggcatctaaaaccttacaatgcttgattttcatacagaagac

SEQ ID NO: 885860 - DNA, 76 bp, Homo sapiens
cgccgcccgaggccgtcggccgccgtcagcgagggcgccgagcaacttcgagaaacagcacccaggactatcttcc

SEQ ID NO: 885861 - DNA, 98 bp, Homo sapiens
gctaagcggcgccgggcgggagaagagcggagcagtggtcggagatgtggcgaccggtactgctataaccagaatttggtagaaaaaggatttacttg

SEQ ID NO: 885862 - DNA, 98 bp, Homo sapiens
aaaagctctacactggcaagccaaaccttgatacttggcatatcgaaattttatgattgacacgtatcgtctaaacccccaagagtatttaactagca

SEQ ID NO: 885863 - DNA, 99 bp, Homo sapiens
tgatctgaatgctgtgaaatcactaggaactccagagtgcactgacaggcagaactcaccagtcacatcaccaggatcctctccccttgcccagagaag

SEQ ID NO: 885864 - DNA, 98 bp, Homo sapiens
tggaagcaggactgcgccgcgtcttcctcaagatgatggacttccaaaaccagaactaatatcctggattgaacacgggggagagcccttcaggaaat

SEQ ID NO: 885865 - DNA, 75 bp, Homo sapiens
acaaactcgaagaacagctgtggaaagaagttgcaaaacactggattacgtgtgaaaatgaacttgtgcaaaccc

SEQ ID NO: 885866 - DNA, 76 bp, Homo sapiens
ctgctctgctgtctcctgcaagaactggctcaagaaatttgcctcgaaaaccaatgcgattgtgccctgatcggat

SEQ ID NO: 885867 - DNA, 98 bp, Homo sapiens
tccgtttcgtggcgccagatgccttccatttcactcctcggctcagtcgcctaggccaagtgaggttggtgcagggaggaggtgcagcaaatttacaa

SEQ ID NO: 885868 - DNA, 76 bp, Homo sapiens
gaagctgaagcattgcttcaaagcatggggctaactccagaatcccccattgatatttggagttcttacaacatgg

SEQ ID NO: 885869 - DNA, 100 bp, Homo sapiens
cggaggtcgataagctggaactgatggctcttgatggaaatgtgtatgatcatctcaaggattatttaatagccttcagccggactgagctagaaacatg

SEQ ID NO: 885870 - DNA, 99 bp, Homo sapiens
tgtctgcgagccaggattcccggcctcaggcccaggcccaaggccaagtgagagagcccaggccacaggacatgctgccattctgccaagagaggctct

SEQ ID NO: 885871 - DNA, 76 bp, Homo sapiens
ggtgaagagttactagctcaaggaaaggccgagggggacggcaagatgcacatcaccctctgtgacttcatcgtgc

SEQ ID NO: 885872 - DNA, 76 bp, Homo sapiens
cgaatctgctgtgacctggatgtcttggccagcaagaagaaatgccagatctggagtaaggaatattgtcatcacc

SEQ ID NO: 885873 - DNA, 99 bp, Homo sapiens
gcaatttccttgctcttttgagttcaatgaagcattccttggctctcacctttgtgtatccttttggtgccacattgagtgtcatgaaaccagcagtgg

SEQ ID NO: 885874 - DNA, 75 bp, Homo sapiens
gtggacatgctgagtgaattagtccagagtggtgaggctaaacggcaatataaaggaaccttagactgctttgtg

SEQ ID NO: 885875 - DNA, 98 bp, Homo sapiens
caagctgaagacatcaagaagatcttcgagttcaaagagaccctcggaacgattttgacacttcatgacatgtcattatttagagcaataatgaatat

SEQ ID NO: 885876 - DNA, 98 bp, Homo sapiens
tgaagattgggaagtggttcctgaacctgttgccagatggtgcaatgttcaaagtactcaagatgaatttgaggatggtgatgggaatctttgcaaat

SEQ ID NO: 885877 - DNA, 99 bp, Homo sapiens
tcattcagaacttcattggcagaagttgactgagatcagaggccctgtgatgatcgtgtcagagcttttctggaaaaagaagaaaagttcaaccacctc

SEQ ID NO: 885878 - DNA, 76 bp, Homo sapiens
cccgatgattccatacggaataagctcattttaattgccagaaacaaagttgacatgaagacaatggagactgcag

SEQ ID NO: 885879 - DNA, 99 bp, Homo sapiens
acaactgccggcttgtgttcaacccagaccaggaggacttggacggcattggaggtgatccttttaatggaacagattttattgactgcctcgaaatct

SEQ ID NO: 885880 - DNA, 98 bp, Homo sapiens
ggcaacaagagctcgcagctttacctgcgcctggtggagacctcgctgaaagccatcgacgagtacaagccccaggatgctaccaccaacccgtccct

SEQ ID NO: 885881 - DNA, 99 bp, Homo sapiens
attgcactaggagtttttgctttagctggactaacagatttgataacccaggaggctggagaattcatgatcactttcccatatggctaccatgctggt

SEQ ID NO: 885882 - DNA, 99 bp, Homo sapiens
ttccgtcccggacagagcccgtggtcgcgcaggactcgctcagcagcagcctgaaaacttgctacaagtatctcaatcagaccagtcgcagtttcgcag

SEQ ID NO: 885883 - DNA, 98 bp, Homo sapiens
gcaaaaagcatttcacttgaacctctgcagaaagaactggttgatccaactaatggaagaaataatggctgaaaaggaaaacaaaacaataatatttg

SEQ ID NO: 885884 - DNA, 100 bp, Homo sapiens
ccaggtgtaagcgcagaaagcaggcgaacccgcggcgcaataacgtatacgctcaacggcaagaaagtggaagttgccgtcaaacagatcatcgctggaa

SEQ ID NO: 885885 - DNA, 76 bp, Homo sapiens
tttgttggcaaacagttctgggggtcgtccgatcctgcagatctttgatggaaaacagattccacagagaatggtt

SEQ ID NO: 885886 - DNA, 76 bp, Homo sapiens
ccggggcgggggtcgctgctgcctggagggccccttctggcatgggaagatgccagaagtggactatgtagttctg

SEQ ID NO: 885887 - DNA, 98 bp, Homo sapiens
aaacgggcagccatggccctccacagcccgcaggtatggcaacagcactaggagctatgctgttagggttggagattatcatactctggtaccagagg

SEQ ID NO: 885888 - DNA, 99 bp, Homo sapiens
gcagctgtatagcatcttcactgtaaaggagttttaaccgtgattggagataccacaaagaagaacgagtatggattaccagggcaccaggcatggagc

SEQ ID NO: 885889 - DNA, 98 bp, Homo sapiens
ctcatcctgtccatcgtgtgcctgatgatcacgcagctggctggcttcagtggaccatgcggcgagggaactccccaggccaccgggttctttgaagt

SEQ ID NO: 885890 - DNA, 98 bp, Homo sapiens
gcccccatgggcgggtgtgtgggcgcccagcacgactcctcgggcagcctcaacgagaactcggagggcaccggaggacccatggatgaaggaccaga

SEQ ID NO: 885891 - DNA, 99 bp, Homo sapiens
tccagcaccgccgcagccacttccttctgtggagcaggtacccctgtccctggtccctgggcccagagggtcacaccgacaaatctgaagcgggtttgc

SEQ ID NO: 885892 - DNA, 98 bp, Homo sapiens
catcaacaacagcaacttgtgattggcggtgaccggatattcagttgcacatccccacatcaatgcactgccaatggggccagagccttgataatctc

SEQ ID NO: 885893 - DNA, 99 bp, Homo sapiens
ctactggtgtaatgatggcaaaaccccaggagcagttaatgcctgtcatttatcctgcagtgaattggcagagggggtcgatttgggaggaaaggtgtg

SEQ ID NO: 885894 - DNA, 99 bp, Homo sapiens
gaagatggacgggaatctccttcttatggtatatgaatgacctaaaggtacaaataaagacggagagagaacagtgccaactgggagcagggcaagaat

SEQ ID NO: 885895 - DNA, 98 bp, Homo sapiens
ctggcggagcagaacggattgcagggttatgaagacagtatggagtttccagaccatagtagacatttgctacagtgtctgagcgagcagagacacca

SEQ ID NO: 885896 - DNA, 100 bp, Homo sapiens
ctccagactatagtgaattttccgaggagatatgtaacatacatatgatagttgagaaagacacatattctgatcatgaagaaataaacacaagttaaat

SEQ ID NO: 885897 - DNA, 99 bp, Homo sapiens
gcggggactactggtgcctgcgctgaaaaagtacaaaactttttaccaacaaaaaaaagcaagtagttatactcaggaagaacttcaagacacttacgg

SEQ ID NO: 885898 - DNA, 98 bp, Homo sapiens
tctggctgtcgcagcgccgggccgccccgactccgagcggctgctgagatgagtgcagtggtgcctgggtcccggcaggaagaagtgatcgaccacaa

SEQ ID NO: 885899 - DNA, 99 bp, Homo sapiens
gctatattatttgcacccagtcctgcagcgccagcagctggactatggcatctatgttatcaaccagggcaaactctttgattctacaatagctgatga

SEQ ID NO: 885900 - DNA, 98 bp, Homo sapiens
ggacattcattgcggaataacatcggaggagaaggctactgcagcactggggtgtcagttgttggtccgacccagaacgcttcagttctgctctgcaa

SEQ ID NO: 885901 - DNA, 98 bp, Homo sapiens
aaagattctgataactggcaaaacaagggtggttgagtttgcctcttatggtgacttaaagaatgctattgaaaaactttctggaaaggaaataaatg

SEQ ID NO: 885902 - DNA, 100 bp, Homo sapiens
gggagcggaagacgcgaccaactccaggcacagcggagccggcgcggggtccacaaagaacaagttgaaatcatcgcagaaggataaagttcgtcagttt

SEQ ID NO: 885903 - DNA, 98 bp, Homo sapiens
gggagcagagcagcaactcacccagcacacaaaatggatctcttacggaagatgagaatgtgcctactgctcctgatcctccaagtcaacatttacgt

SEQ ID NO: 885904 - DNA, 99 bp, Homo sapiens
ggtctggagctcgaccgggccaggaaagaccacagcaagattctttcattcgtctcctcctagcctgggggaccaggctcgaactgaccctggacatca

SEQ ID NO: 885905 - DNA, 100 bp, Homo sapiens
ctgatctggactcctccgtgcccgctgacattatctcatccacagacaaacttgagccaaggattgtcaccagtgaagaggtcattattcgagacagccc

SEQ ID NO: 885906 - DNA, 76 bp, Homo sapiens
ccgtgacatccgaggtgcctttctccaaaagaggatgtgctgtggtttaaaccagtggaactgagaacgaagtggg

SEQ ID NO: 885907 - DNA, 75 bp, Homo sapiens
agcaagcagttcagaagagccaaggaataaacatgcaatgaacccaaaagggagctgctgctcaagaggtcatca

SEQ ID NO: 885908 - DNA, 99 bp, Homo sapiens
tgcccactgctgccgcccagtgttatcactggggtgatcctgctggctgttggagtctggggcaaacttactctgggcacctatatctcccttattgcc

SEQ ID NO: 885909 - DNA, 76 bp, Homo sapiens
cgcgtccgaggctcgcgggcggcgggcccggggccgcgatgggcctcttggaacattggtgtgttcatctgcattc

SEQ ID NO: 885910 - DNA, 98 bp, Homo sapiens
aaattttataaccaccccttgcactttgttttcaatgacaccaagttggacgctatgctggaagaatttaagaaagctgactcaggtgttgacacctt

SEQ ID NO: 885911 - DNA, 98 bp, Homo sapiens
gccgaagaagcatcgttaaagtctctcttcaccctgccgtcatgtctaagtcagagatgggcactgtgccccgactgcggcctcgcctcaatgccatt

SEQ ID NO: 885912 - DNA, 98 bp, Homo sapiens
tgagtgccactcgtaagaatgccagcaacatggagtacaggtaggagcattgcttttcgtggtgaaagaggcaatgatgaatctgccatcgaaatgat

SEQ ID NO: 885913 - DNA, 99 bp, Homo sapiens
cgacacgccggggcgcccgcgcgcggggaccccacggggtgctggagaatctggtaaaagcaccattgtgaagcagatgaggatcctgcatgttaatgg

SEQ ID NO: 885914 - DNA, 99 bp, Homo sapiens
ggcagaagttttggtgataaagattttcggacaggtttagaaaatggaatcctcctctgcgaatcattgagactgaaaatatgatggaccgaattgtga

SEQ ID NO: 885915 - DNA, 99 bp, Homo sapiens
acaggaccagtttgccatcccaaggccgaagaccttagctggatctccaaaatacaagtgaatcacccggcagttctgaggcgtgcggaacaaatccag

SEQ ID NO: 885916 - DNA, 75 bp, Homo sapiens
tcaggttccaaagtacctacctcaggagcagagatttgatattcgagtgctgcagaatcaaattggatatcccca

SEQ ID NO: 885917 - DNA, 98 bp, Homo sapiens
tcctgccctcagcgcagggccgccagaaggagtcagacagcgtcatggcagagcaggtggccctgagccggacccaggtgtgcgggatcctgcgggaa

SEQ ID NO: 885918 - DNA, 100 bp, Homo sapiens
acacttattattggttggcaaccagaaattacagaagacatccccgtgaagactttgaatatgaagactgtgtatgtttctgtgttaccaacaacagcag

SEQ ID NO: 885919 - DNA, 99 bp, Homo sapiens
tcccgatcccgaccccaaaagagtattcttggatcttgcacaggaaggaattaaaggtgaaaggtgtagcagtcactcggcctacacccacagcatcga

SEQ ID NO: 885920 - DNA, 98 bp, Homo sapiens
gacaacaaaaagcatgaggaacgtctgggcacggcagcagcgttctcggatgctagctactctttttaaggatgaaaggtgccagcaacttgctgcct

SEQ ID NO: 885921 - DNA, 75 bp, Homo sapiens
cggaaagtgctcctgcggctgtatggagcgattttgcagatggattctcagctggtagctggtgttgcattcaag

SEQ ID NO: 885922 - DNA, 75 bp, Homo sapiens
atcacggtttttggaacaaggattttggatgaagaagtttttgaggcttgcattgatgacaatgttgatatggtg

SEQ ID NO: 885923 - DNA, 76 bp, Homo sapiens
atagttccttgggaggtgcttcattagaaggatcccaagtatatcttgaaacctgtggatttttgtatctaagttt

SEQ ID NO: 885924 - DNA, 99 bp, Homo sapiens
aagaatccaccaccacccatcaattttcagactgccactctccgcccctacctgagtgccgtgcgggccacattgcaggctgccctctgcctggagaac

SEQ ID NO: 885925 - DNA, 99 bp, Homo sapiens
ttgtaatcagcttcttaccaaatacagaagctcctcaagagttactgatctatgaaatggcagagaatggaaaaaattgtgaccagagacgtgtagcaa

SEQ ID NO: 885926 - DNA, 76 bp, Homo sapiens
ctcgggccccgcccggcagtcgcccgttgccatggaaactgcatccacaggatgacagtgatgggattccgtggtc

SEQ ID NO: 885927 - DNA, 99 bp, Homo sapiens
gacaacatctggagaggcatcctctctgttattttcttctttcttatcatcagtgtgttagctttccccaatggtagcacaggcggagtgcagcggagg

SEQ ID NO: 885928 - DNA, 99 bp, Homo sapiens
aagaaagcgcaactacgctccgctccgcgggccaagaaactggagaaactcggagtgtactccgcctgcaaggaagctattttgccagccacttcatta

SEQ ID NO: 885929 - DNA, 99 bp, Homo sapiens
aactttgtccttcattgaattacgacactgtccacctttaatttcctcgaaaacgcctgtaactcggctgaagagaattcggtcaacagtggatgaaaa

SEQ ID NO: 885930 - DNA, 99 bp, Homo sapiens
ccgagatttgggagagacgctctgaactgactgccccgcatcaccggagcgtcccagctgcgaggagttcccatggagaatgttgcaacaattgctgat

SEQ ID NO: 885931 - DNA, 75 bp, Homo sapiens
ccagaaaagctgcaggccatgcacctggagcgatggttgatgcccagctacaggtagtaaggaaactggaagaga

SEQ ID NO: 885932 - DNA, 98 bp, Homo sapiens
aaaatcccagatctacctgacgggcctgcgagggttgaagattgtgaagcaatagcctaagatgtctttggtggacttgggaaagaggttgctagaag

SEQ ID NO: 885933 - DNA, 100 bp, Homo sapiens
cagcacttccggtcacgccatcgttgctgccttcttcgtcaagatgtgtgcaacagcaccgatcttccggaagtcgagatcattagcctgctggaggagc

SEQ ID NO: 885934 - DNA, 99 bp, Homo sapiens
caaatcttgcggcaacgcccccgggacatgcatcgtcccctggactctctcaaggatgtggatttgccaagtctgcagaccaaagaaaaagggaagaaa

SEQ ID NO: 885935 - DNA, 99 bp, Homo sapiens
ttgtggtcactggagctaattcaggaatagggtcctgatgaagaagctgttgtggatcttggcaaaactagctcaactgtgaacaccaagtttgaaaaa

SEQ ID NO: 885936 - DNA, 99 bp, Homo sapiens
agtcgtgttttaaagagtacagtgcggggaggctgagaggggcgcatgcaacaacaacttttggaagggttaaagatcgaggtccggaagccactagga

SEQ ID NO: 885937 - DNA, 76 bp, Homo sapiens
cgtggttgtacgagacgtggcctgtggcgctaaccacacggaggactcggaggagagtgaaattgacatggaagat

SEQ ID NO: 885938 - DNA, 99 bp, Homo sapiens
cctgcatttgtcactgaccactgaagtgtatgtttgtgcaagaaaacatcggagcagtgtgggtccgagcaaacctgtttcccagccccggcggaacat

SEQ ID NO: 885939 - DNA, 99 bp, Homo sapiens
gaagaggacgggctttaggctggaagcgccttagaggagccatttttccagacacgagacgacttcctgggccaggtggacgtgccccttagtcacctt

SEQ ID NO: 885940 - DNA, 99 bp, Homo sapiens
gcagggcctgtgtgatgatgcagggcaggttccacatgtatgaagggtacccactctggaagttggagaatattggcaactttattaaagctattcagg

SEQ ID NO: 885941 - DNA, 100 bp, Homo sapiens
aagaaccttgctttctactggattctgaaagctggtcatatggttacaggaggttccagtggcatcgggaagtgcattgctatcgagtgctataaacaag

SEQ ID NO: 885942 - DNA, 76 bp, Homo sapiens
ccagatcatggagaccaacctgtggctcaagcaaaggagaaggcagagcccccccaggctatgaatgccctgatgc

SEQ ID NO: 885943 - DNA, 99 bp, Homo sapiens
gcagaaagctggtgttacacacaggtaaaataccatgaagattttgaaaaaacaaaggggagaggctttactcccgtcgtggacgatcctgtgacagag

SEQ ID NO: 885944 - DNA, 99 bp, Homo sapiens
ttattttaacatttgggagaaacacagccagaaggaataactcaagtcacctgtactggaaatcagtttgctgaaattaatcaacgattcttgaagttg

SEQ ID NO: 885945 - DNA, 98 bp, Homo sapiens
ttccccttctacaagaacaaggaccagagtgagcaggaaacaagtgatgctgacctaacgtgcctagtgttgggagcctagcagatccagactatctg

SEQ ID NO: 885946 - DNA, 98 bp, Homo sapiens
tcagtggcagccccatgcgagcacccgaggaaggctcagtttatgaacctcttaaaagcattaatcttccaagacctgataatgaaactctctgggat

SEQ ID NO: 885947 - DNA, 98 bp, Homo sapiens
tattaggtatcataccttatgcaggcatagatcttgctgtgtatgaggcaattaagttggaatatgcaaggttggttaagttggcccaagaagacacc

SEQ ID NO: 885948 - DNA, 99 bp, Homo sapiens
gggagggctggccaacttctgctacagacgactcactggatacacagtatcgtcgctcatgtgcagttgagtatcctcatcaggcccgacctggcaggg

SEQ ID NO: 885949 - DNA, 76 bp, Homo sapiens
tttaatcctgaaagccatgcagcggagcctcagcttaagggtatagttaccaagctatacagccgacaaggctacc

SEQ ID NO: 885950 - DNA, 76 bp, Homo sapiens
cggcaaggagcggcgggatgccggggacaaggacaaagaacaggagctggaaacactgcgctaacttatgcatgtg

SEQ ID NO: 885951 - DNA, 75 bp, Homo sapiens
gtggctgctgatggacgcatcgagccaggagatatgttgttacagggtgtcaaattgagaaccaggtagatcccc

SEQ ID NO: 885952 - DNA, 99 bp, Homo sapiens
gcctctgggagcagaagggaggctccaagacctcatcaacaattaagaatccagactccaaaatgatgcaaatcaacctgactggatttttgaatggaa

SEQ ID NO: 885953 - DNA, 76 bp, Homo sapiens
ggagttttgatgaatgtaatgcagtctgccacctatctgctcgatggaaagaattggcagagggggtcgatttggg

SEQ ID NO: 885954 - DNA, 76 bp, Homo sapiens
cctcactctctccgatactttctcccaagttttacatgtggcacccataaaagatgaggctgagaacacggaaagc

SEQ ID NO: 885955 - DNA, 98 bp, Homo sapiens
ttagaaaagggataaaatggacccttcatgccagatgggtggccacctagtccacggacagcctcgggggtaacagcaagaccgccatggtggctact

SEQ ID NO: 885956 - DNA, 99 bp, Homo sapiens
atgcctctcatcgggagaatgctcttcaggatagtatcttggccagggaactcaaacagcagatgcaggctctctatgagaacatgctggtggagctgc

SEQ ID NO: 885957 - DNA, 100 bp, Homo sapiens
ctttgagaccctgttcgccaacacctgcgaggagtgtgggaagcccatcggctgtgactgcaaggtcactctgactgctgagacctcatgtagctacatt

SEQ ID NO: 885958 - DNA, 98 bp, Homo sapiens
tgcaaactctgcaatgtcaccttgaactctgcacagcaagcccaggctcattatcaggaaactactaaagttcctggggaagcaaagtagaatttcat

SEQ ID NO: 885959 - DNA, 75 bp, Homo sapiens
caactatggaacaacaacttgcagctcatctctattgatgtttctcttcagcaacgggtagcagaattggaaaaa

SEQ ID NO: 885960 - DNA, 100 bp, Homo sapiens
aagtggtagtaggagctgaaagattacgagttttagtatctttacgcgttcagtattgttcccatgaagctaatggatgcagcagaactggtaaaacagc

SEQ ID NO: 885961 - DNA, 99 bp, Homo sapiens
ggaggactacagccgccaccgctccgaccacaagatcaaccacctgggctgcctggtcttcagcaggttttgggatttgagattgacgcggtgaactct

SEQ ID NO: 885962 - DNA, 99 bp, Homo sapiens
gaaaaactaagaaatccctggagttatccaaagaagacctcatccaactactcagtataatggaaggggagttgcagaattttccaatgagaaaagtgc

SEQ ID NO: 885963 - DNA, 98 bp, Homo sapiens
ctgccagcaagaaatgatcagtagcaccagtgtttatggtatgaatcctaggacccagaataaggattctctagaggacagtgtttctacctctccag

SEQ ID NO: 885964 - DNA, 98 bp, Homo sapiens
ttgtaccagactccagactccctggtctactggaccatcgcctgtggggcttctgaggagaatggcctgcctcacacgtcagccagaacccagctgcc

SEQ ID NO: 885965 - DNA, 99 bp, Homo sapiens
actgttgctggcctgaatacacctgcatgaggtggctgaagactccagttggctcagagcccctacctcccacacagtggaggagtagatgtccatttc

SEQ ID NO: 885966 - DNA, 99 bp, Homo sapiens
acgacagaagcgactttggtgagactctgttggggtttgaagaagtctcagagctgcagggggaccccggctacccactcgggcggtttggagaagcca

SEQ ID NO: 885967 - DNA, 100 bp, Homo sapiens
aaaggacagcattcctgtgacctctgcctaccatccataaaatactcattcccctctcaggttgctgtagtaaaactaaaaaatgcagataaagtgtttg

SEQ ID NO: 885968 - DNA, 76 bp, Homo sapiens
acccaaagtctcgcttctgccgaggtgtccctgcatttttcagttgaaggacagttggaattcagagcccttctat

SEQ ID NO: 885969 - DNA, 99 bp, Homo sapiens
gacgagcctttcttatttctttactcaacctctttgatgacacagcagaattttctacttctggtcatgcttacactgatacagggaaagcatcaggca

SEQ ID NO: 885970 - DNA, 99 bp, Homo sapiens
caggagcttatcaagatacaattgaataatcaaagggtggagcctggacaaaatgtttacttgtctgtactatactggcaattgctggagaagattttg

SEQ ID NO: 885971 - DNA, 99 bp, Homo sapiens
ttaacccagaagtagctgaatgtgttactccattgctgaggagtgtgatgtccttgcattgcccatttttaagcaagaagagtcgagtttgcctcctga

SEQ ID NO: 885972 - DNA, 100 bp, Homo sapiens
aacgggactaaactggcgggctccgtggaagcgtggccggcagcgtcccggacgaggaggaattgaatgatctggcacgggaccctccagcacagtgttc

SEQ ID NO: 885973 - DNA, 99 bp, Homo sapiens
atgagcagtgtttcgtgtgcgctcagtgcttccagcagttcccagaaggactcttctatgagggtcaccgggagcaagaagtccaccaagaggaccaaa

SEQ ID NO: 885974 - DNA, 98 bp, Homo sapiens
aactccagaagcagaaagtacagtctatgaatgagatagtccagagcaacctctttaaaaagcaaggactatcggacaaaacctttctgctgcagcgc

SEQ ID NO: 885975 - DNA, 99 bp, Homo sapiens
ccagccttcttcagcaccacctttttggggaagatttacctagctgccaggctctccagcagaactatctcctactactctttcccctgttaatcatag

SEQ ID NO: 885976 - DNA, 98 bp, Homo sapiens
ctggactccagtcccttgtgggaaacaatccctcgcctccggaggcggcgaggagcggcggtaagagttccctatttcattgatttgaaaaaaccaca

SEQ ID NO: 885977 - DNA, 76 bp, Homo sapiens
attctgacgccctcaaggtcgccaaggaggtggacccccaggatgacttcccagaatctacaggagtaaagcgaat

SEQ ID NO: 885978 - DNA, 98 bp, Homo sapiens
cttgctccagaagcaggaaataggttaatcagaagattgctggatgttatgaaaagaatcttttatggggggctgttttgagcaaaattttggactgt

SEQ ID NO: 885979 - DNA, 75 bp, Homo sapiens
cccgggagacctaaccgccgaatgcgttcggagagtgaaagcagcagcagtagcaacatctccaccatgttggtg

SEQ ID NO: 885980 - DNA, 99 bp, Homo sapiens
gtgacagctgcctccaggtgtttgaatcgctgagcgatatcacagaacacaagattaatcaatgtcaactgacaggattcaagccaaaactcgagaatt

SEQ ID NO: 885981 - DNA, 98 bp, Homo sapiens
tcactttttacacactcgtgatgtagttcatcttgatttgaaggagtcggatggtcagggctgccctttctgtcgttgtgaaataaaaggaactgagc

SEQ ID NO: 885982 - DNA, 75 bp, Homo sapiens
gcgagcagcacagagacggctgaaagctgagctaggaattcccttggaagaggtgattcaatgccactttattct

SEQ ID NO: 885983 - DNA, 100 bp, Homo sapiens
ccaacagagcagtcagcagagcagccacgatgatgattctagcaggttcctgagtcctcgagcgcgggaagaaagtgggttgtatcccctgcagaaaaag

SEQ ID NO: 885984 - DNA, 99 bp, Homo sapiens
gagaagatctgggaaggagtcagtcagagagccttgggccagagttccagggtctctgggagtggctgccagcattttgaaagcgaagcagaagccgta

SEQ ID NO: 885985 - DNA, 99 bp, Homo sapiens
gcgagcggttccttgtgggctagcttcctgcctgacacagctcacttcaagaagtgcacaatgtcagaacgtggaattaagtgggcttgtgaatattgt

SEQ ID NO: 885986 - DNA, 99 bp, Homo sapiens
tgcagggctctgatcaagcggatccaagccatgattcccaagcaagcaagagaaatggtactagagattatccgagaaaaagaccaagctgactttcgg

SEQ ID NO: 885987 - DNA, 98 bp, Homo sapiens
caaaaatgcacaattctatctcttgggcaatcttcacggggctggctgctctgtgtctcttccaagtggccagtttgccatcgtgaagaagtgccggg

SEQ ID NO: 885988 - DNA, 98 bp, Homo sapiens
gaaagtcagcatgattttcgaaccccggagtttaatatgcttttaaggctattaaccagggtggccttacatcagtagctgtcagagggaaagactgt

SEQ ID NO: 885989 - DNA, 100 bp, Homo sapiens
agaagctccagctgctgaaccaccggcctgtgactgctgtggagatccagctgcctgaaagaatagacccaagcgcatcacgacaaggatatgatgtccg

SEQ ID NO: 885990 - DNA, 99 bp, Homo sapiens
gaacttatgtgctacgctcattcaaaaggagccagagtagtacttaaagggcttcgtgggacacatatgcaacatgcctatgatttttacaagcctgat

SEQ ID NO: 885991 - DNA, 76 bp, Homo sapiens
caaaactcttgacagaagctgtgacaaccagaaaggatgcctcataaaggttccttcaatggtgccttagctgctg

SEQ ID NO: 885992 - DNA, 99 bp, Homo sapiens
cctgaggagtggggtgccaggtggaaggagaagaaagttttctggatatgccgcagaaggatccgtgccagaagcaagcctgtgagatacagaaatgtt

SEQ ID NO: 885993 - DNA, 100 bp, Homo sapiens
gaacaaggctgccgacgctgtcaacaaaatgacaatcaagatgaatgaatcggatgcagatgtcctggaacaggtggaggcctatcaagctgaggctcgt

SEQ ID NO: 885994 - DNA, 98 bp, Homo sapiens
tgaaggacagcggcaccgccagacggccagaaagttccgccatgagctggggcacggagctgtgggctgaagtttctctttggctcatcagccaccca

SEQ ID NO: 885995 - DNA, 98 bp, Homo sapiens
gagaaaccgcagcactacacgagatctattgggaaactgattataaccactcgggcaccatcgatgcccacgagatgaggacagccctcaggaaggca

SEQ ID NO: 885996 - DNA, 100 bp, Homo sapiens
ccagggagctgtcacccagcgacactcacttcaccagggaagtcctcgctggggatggccctcttccgtctggtggagttatctggaggctgcatcaaga

SEQ ID NO: 885997 - DNA, 99 bp, Homo sapiens
gtggaccacatagacatttacgcggatgtcggcgaagagttcaaccaggttctgcggggagtgtctccagccctgcctgcaggtgccatccccgctgtg

SEQ ID NO: 885998 - DNA, 99 bp, Homo sapiens
tactcagaagaacttgtacagagatgtgatgttggagaactatagcaatctggttttcttgggtgaagctcgtgtgtggagtgccacggtacaatcaga

SEQ ID NO: 885999 - DNA, 98 bp, Homo sapiens
gacgacgcagttccacagtctgatggagttcgaggaatttataagtgaagtatttgactatttggttgcacatggcaggatgaaggaaaaagaagcaa

SEQ ID NO: 886000 - DNA, 100 bp, Homo sapiens
ctcgggtgtcggactcccaggaggggccaattcctgtccccccagcagcatggcatcgtgtgctgaaccctctgagccctctgccccactgcccgccggg

SEQ ID NO: 886001 - DNA, 99 bp, Homo sapiens
aggcgcctggtgccccgcccaggaccctgacgtgggaagccatggagcagatacggaattacatgaatgacagtcttcgaaccaatgtgtttgttcgat

SEQ ID NO: 886002 - DNA, 99 bp, Homo sapiens
tcccggctcgacaagttcaagcagctgcttgccggccccaacacggaccttgataacttttaagtggtgaagagtataaatcgtggttttccaagtgta

SEQ ID NO: 886003 - DNA, 76 bp, Homo sapiens
gttcttctaatccaaaatgggatgaacagctaactgtcaaaacaagggttcctccagttttggtggtggaaatgtc

SEQ ID NO: 886004 - DNA, 98 bp, Homo sapiens
aggatgacaccggagtttgacgaagaggtggtttttgagtgaattttgaagattgcaccggtcgacaaaggacagcctatttttccctcgacacccga

SEQ ID NO: 886005 - DNA, 98 bp, Homo sapiens
tctggagtgcgtgggggaccggctgttggcgggtgaccagaagtcagcagcttcccagaagccccgaagccggggcatcctccactcactcttctgct

SEQ ID NO: 886006 - DNA, 73 bp, Homo sapiens
cgggagctcctggtcatcgagctgtccgacaaccctggcgtccatgagcctgaagtgtcggaggaaggcttcc

SEQ ID NO: 886007 - DNA, 75 bp, Homo sapiens
ctgaaaatggaagttgctgttttgaaaaagctgcaagggtgctggagaagaagcaagacaccggggagacaatcg

SEQ ID NO: 886008 - DNA, 99 bp, Homo sapiens
aggaatacctcgtatgcaacctcaggcttcagccatgttccttgcctgtatctccccttggttcaatagctaccagatttttggaagaggaggaactga

SEQ ID NO: 886009 - DNA, 76 bp, Homo sapiens
acgaaaggcagccgcggatcgccgcgctcagcgacaaacaactcccggagccctgcctgttccctgtccatccagg

SEQ ID NO: 886010 - DNA, 76 bp, Homo sapiens
ctgcccggggccctcatggacggttggatcagggccgaagatggccgccctgctcccccaatgaaaggccagcttc

SEQ ID NO: 886011 - DNA, 99 bp, Homo sapiens
ttttccttctctccgtgcaacgctggcaagtctcaaagtcgccacaggaattgaatgatctggcacgggaccctccagcacagtgttcagcaggtcctg

SEQ ID NO: 886012 - DNA, 98 bp, Homo sapiens
tggctctgccgcaactgccgcctcctctcccgccgcggcggccggcgatagcccggcgctcatgacaggttcgatacaagaggctgttttcctagcgt

SEQ ID NO: 886013 - DNA, 100 bp, Homo sapiens
gcagcggtacctgaagacccgggagaagttcacctgtggcagatgatatcatccagcccgctgcccccgcagacctggaaagcccaaccttagctgcctc

SEQ ID NO: 886014 - DNA, 76 bp, Homo sapiens
gccacgcagaggacgccggaacaccctggaagccgagaaatggacttcctccgtcaggcagctggcaggacctgaa

SEQ ID NO: 886015 - DNA, 75 bp, Homo sapiens
cagcatcagggagaatggggccaagctcagcctcacaggccaaagcatcagcaccagaacgcacacccagcccag

SEQ ID NO: 886016 - DNA, 99 bp, Homo sapiens
tgtggtcgcgcctctcgctcctggctccgaagacaactttgccagtactatactggcaattgctggagaagattttgcaattgttgcttctgatactcg

SEQ ID NO: 886017 - DNA, 75 bp, Homo sapiens
ccgagcggtgactccccgccgctcccgggggccgtgacgggaccagttactctccacaagaaaattcacacaacc

SEQ ID NO: 886018 - DNA, 98 bp, Homo sapiens
accgctctgcaggctgttcctcctcggcctcaaggaataggttctcctagtgtctatcatgcagttatcgtcatctttttggagttttttgcttgggg

SEQ ID NO: 886019 - DNA, 98 bp, Homo sapiens
gagtctccaggaccagaggggcttggatgcagatgatcatcatctgggcactgctggatactgagtggcatggaatattcacatgggagagccgcatg

SEQ ID NO: 886020 - DNA, 99 bp, Homo sapiens
ggagacttttctatcccaagaagtggtggttaatcttttacaagaaaccaaacaagcctttgaaagatgtcatagggttgtaaagctctctgaaatagt

SEQ ID NO: 886021 - DNA, 100 bp, Homo sapiens
ggcgggagcgcggcgcgggagcccgaggctgagactcaccggaggaagcggcgcgagcgccccgccatcgtcccgcattcctctgaatattgatttgctg

SEQ ID NO: 886022 - DNA, 99 bp, Homo sapiens
atccatctgcacagctggggcccctgggaggagacgccatgatccccaccttcacggctctgctctgcctcggattcactccttctccagttgcacagc

SEQ ID NO: 886023 - DNA, 98 bp, Homo sapiens
tccgaaaaaacaaaacaaatatgaactatgataagctgagcagagccctgcgatactattatgacaagggatgtcagagacgcccatgctcccatcct

SEQ ID NO: 886024 - DNA, 99 bp, Homo sapiens
atccacgccagccgcaccatgccgctcctaagcctgcacagccgcggcggcagcagcagtgagagatgccggaaggtccttctgaatcccttccctgtt

SEQ ID NO: 886025 - DNA, 100 bp, Homo sapiens
cgtgtgcgcgcccgccagctgctccggagatacgatggactttctggccgagaccagccagtggagctgctgaatcctgcccgcgtgaaccacatgccca

SEQ ID NO: 886026 - DNA, 98 bp, Homo sapiens
tccactggaagacctggctggccatcaagtgctcgcccagcctgcacgtcgacgacaggtttggtgcacctcgatttggaggaagtagggcagggccc

SEQ ID NO: 886027 - DNA, 99 bp, Homo sapiens
acggtgctatcagaatattgactattagtgctttcatcacgcggctccatccaaacccctgctttccctcactccaatgtccaacatcacagtcacata

SEQ ID NO: 886028 - DNA, 98 bp, Homo sapiens
atgaagctcctgaagccgacctgggtcaaccacaatggttactcactataaacaatatccacccaacacaagcaaagtttattcctactttgaatgcc

SEQ ID NO: 886029 - DNA, 98 bp, Homo sapiens
gggaccttgccaaccctcccaagaagttcagaggtatgttgagtctaaaaaggacagagtcacagtagtcttcagcacagtgtttaaggatgacgacg

SEQ ID NO: 886030 - DNA, 76 bp, Homo sapiens
cccgcggcgaccaagatcaggaacctgccctgaaatcatgaccaccccaggaaaagagaactttcgcctgaaaagt

SEQ ID NO: 886031 - DNA, 75 bp, Homo sapiens
tcacatctaaaccaaccactgccacaacctgcgcagcagacaggtggagatgttacagccaaaaatatctggttg

SEQ ID NO: 886032 - DNA, 98 bp, Homo sapiens
gatgaactagtagatagagccaaacaatcttttcaagtgagaaagatcagtctaaagaaaaggagaagaaagtgaaaaaaacaattccttcctgggct

SEQ ID NO: 886033 - DNA, 99 bp, Homo sapiens
tatctttgccccatcaggtgccaattcccttcttgacatggccagcaagatccgggaggacccactcttcatcatcagcacccagtttggccttctctg

SEQ ID NO: 886034 - DNA, 98 bp, Homo sapiens
gcagcccgtcggccgccgccaactacctgctctgtaccaactgccggaaagtgctgcggaaggacccagatgatgtggtaccagttggccaaagaaga

SEQ ID NO: 886035 - DNA, 99 bp, Homo sapiens
aggacggaagaggccctgcggaggcggcggtgcagcgctccgaatcaagatttatttgctacatcacaaagtaaagaatttgatcctcttggtccattg

SEQ ID NO: 886036 - DNA, 99 bp, Homo sapiens
ttgtgatctggggaacagatgtaaatgtggcagcatgcaaagaaaactttcaggcgcagttgtgtagcagttgagtaatgctggttagctgttaaggtg

SEQ ID NO: 886037 - DNA, 99 bp, Homo sapiens
ggaggcctcgaggaagagcgggttatgatgatggttcttcctttattgatatttgtgcttctgcctaaagtggtcaacacaagtgatcctgacatgaga

SEQ ID NO: 886038 - DNA, 99 bp, Homo sapiens
tttatttcaaaattggagcatgtcgtcatggagacaggtgctctcggttgcacaataaaccgacgtttagccaggcttgcagccctgagtgatcgagag

SEQ ID NO: 886039 - DNA, 99 bp, Homo sapiens
ggtcataaatcctagtggtggactgatttcaaagggacacccactaggcgctacagtgttctaagaacggaagcatctgggctggatggaatttagcat

SEQ ID NO: 886040 - DNA, 99 bp, Homo sapiens
atgagtgcagccggctgcaggagcagctagcgcagggcatgtctttaacttcagaatggtttgcaaagtatttgcaatcatcagcagctgcatgttggg

SEQ ID NO: 886041 - DNA, 75 bp, Homo sapiens
cggcgccatggcagggcttgcagaggaggtgtctgcaaggatagttcaagtagtcactgctgaggctgtagcagt

SEQ ID NO: 886042 - DNA, 75 bp, Homo sapiens
tccgcgtgctgcgccccctgcggctggtgtccggagtcccaaaccagttaaagaccctgcagaggaattacggca

SEQ ID NO: 886043 - DNA, 99 bp, Homo sapiens
agaaggccagagtcacacacggtcctaagagctgggcaccaggaagcgaaggctgaggacaagaattttgggcagatttgaatgccatgaacgtgtatg

SEQ ID NO: 886044 - DNA, 76 bp, Homo sapiens
ggagcctatggagttgtacttaaatgcagacacaagtcctattttgtaacggattatgatccaaccattgaagatt

SEQ ID NO: 886045 - DNA, 99 bp, Homo sapiens
ttcgaaaagctgccaagttgaaaatggacgagtaatcgcctgctttgattcattgaaaaatgcctaccgcaggaatgggatggcttttctagcctgctg

SEQ ID NO: 886046 - DNA, 100 bp, Homo sapiens
ctgcagattctctcagatgaccggatttctgtgctgtgggaagaagtctcctttcagccgtctggggagcacagaggctgacctgtgtcagggagaggag

SEQ ID NO: 886047 - DNA, 76 bp, Homo sapiens
ctcgagtctcaagtggacaatgtcgggaagacgtctctgattacgaggttcatgtacgacagcttcgacaacacat

SEQ ID NO: 886048 - DNA, 98 bp, Homo sapiens
tctcgctccgtggccttagctgtgctcgcgctactctctctttctggcctggaggctatccagcgcaagtgaaccggagcaaacgacttccgatccag

SEQ ID NO: 886049 - DNA, 99 bp, Homo sapiens
gatgaggaagttacatctttggcaaagtctctcatcaaatcctggaaaaaattattaggtcaacatgattgtgtgaccataatcaacaatttctttcct

SEQ ID NO: 886050 - DNA, 98 bp, Homo sapiens
ggttgtccgggtcctgtcaatgtcaccctgattacatcaaccccagagccgtgcagctgggctcccttctcgtccgcggcctcaccactctggtttta

SEQ ID NO: 886051 - DNA, 76 bp, Homo sapiens
gccggccagccgaagatggtggcggctactcctcctggttatgaagacagtatggagtttccagaccatagtagac

SEQ ID NO: 886052 - DNA, 99 bp, Homo sapiens
ttcgaagggggctgcagcggagatccgagagcagggggatggggcagaggacgaggagtggaagaggtgtggtggaaaggtcttccagaaccagaggct

SEQ ID NO: 886053 - DNA, 99 bp, Homo sapiens
tagaatgtcttcctcaaggcctgccatggacaattccaccagaggagttcagcaagagaagggatttaagtgaaggtggtgtttttaaggctcatctta

SEQ ID NO: 886054 - DNA, 98 bp, Homo sapiens
tgcgtgattcccgtgattgcgttacaagctttgtctccttcgacttggagtctttgtccaggacggttaaagatcgaggtccggaagccactaggaga

SEQ ID NO: 886055 - DNA, 99 bp, Homo sapiens
acgaaaactggatatacagagcccagcccagaaaaggctcttgcagccaatgccggaacaggatttgctgttgctgagcctcaaatcgcaatgttttgt

SEQ ID NO: 886056 - DNA, 75 bp, Homo sapiens
agagtcgctggagcgggcggagctgtgcgagagcctcctcacttggtgatcagggccaaagcggtcagtgagaag

SEQ ID NO: 886057 - DNA, 98 bp, Homo sapiens
ggatacagcagtttggtcaatattgtcttaacatgcttcaaataaatcaggtacgaagatgccctggtgctcctgctcacagaggtgttgaatcgaat

SEQ ID NO: 886058 - DNA, 100 bp, Homo sapiens
gaaacagtctacaaacacagctgtggggggttgcctcctgttcgaagtgcactggaaaaggcatcttctctgcattcagtttcatccaagtcattccggg

SEQ ID NO: 886059 - DNA, 99 bp, Homo sapiens
aactcccagggcccgcccaggacccccaagccgccgcggacgcaggtgtcgtgaaaactacccctaaaagccaaaatgggaaaggaaaagactcatatc

SEQ ID NO: 886060 - DNA, 100 bp, Homo sapiens
agtatggagaacatgaagccagtcctgacaatgggcagaacgaattcagtgatatcattaagtccagatctgaaatcaatgtggactgaacataaatcac

SEQ ID NO: 886061 - DNA, 76 bp, Homo sapiens
gtcagcttcatcctcggcggcggtggccgctagctccaaggaagtccgcctcagccgtgccgccgattcttccctc

SEQ ID NO: 886062 - DNA, 99 bp, Homo sapiens
atttagatttgatttgtcgagctcatcaggtgaaagaaatcacccgtgatattaagcaattagatcacgccaaacgccacctgaccacctcaatcacca

SEQ ID NO: 886063 - DNA, 98 bp, Homo sapiens
gtgggatgtgtatgaccttcacctcattaacagttcttcacacacccccattcggcgtagtacccagagagctcaagatgtgtggcagttttcggatg

SEQ ID NO: 886064 - DNA, 99 bp, Homo sapiens
ttatggagccagctgtgtcagtagtggacggccagacagagtccccggaggagttgatcaagaacttaatggaaaacaagatgaaccgaaaaatgaaca

SEQ ID NO: 886065 - DNA, 98 bp, Homo sapiens
ctgagcctgccccagccagtaccagcgccgtgcaccagtggaacagtgattaacaagctgaaggttgttaagaagcagacatgccctttacagactgg

SEQ ID NO: 886066 - DNA, 99 bp, Homo sapiens
ttcactcgagagatgaggacactgaaattcagagaggggaagtgatttgcctcagcttgtactgtgaaagaactcttttcttctttgggagtcgaatgt

SEQ ID NO: 886067 - DNA, 98 bp, Homo sapiens
gtcaagccaagcaatagcagctgtgacccgggtgcatcagtggatatagttgtgtctccccatggggtgacaaccatgagtggaaaaaactaattatg

SEQ ID NO: 886068 - DNA, 99 bp, Homo sapiens
catttttgcttatctgccttatgggcttgcagaaggaatctcactctcagacacgatgaggcgagtggtacgacagagcaagtttcggcatgtatttgg

SEQ ID NO: 886069 - DNA, 76 bp, Homo sapiens
caagccccgctaggagccacctagactggatgcagagcatgtgttctcaggcgctgtggtctcaccttccactggg

SEQ ID NO: 886070 - DNA, 99 bp, Homo sapiens
atatccttctcaaccttgtgggatgtgaaaactctgttactgaaggcaggcagtggttaaaggttcccttccacatccttttgccttgacgttatttga

SEQ ID NO: 886071 - DNA, 99 bp, Homo sapiens
aaactcaagcagcgagtcatccaggtacttcttgcaagggatatgcattagcacatactcaagaaggggaagaaaagaagcaaacttctggtacatcaa

SEQ ID NO: 886072 - DNA, 98 bp, Homo sapiens
gaagcacctggatgagacatttgctacagcatcccacattaagtcaacggtttttgccaatccagaagactgtgtagcatttggcaaaggagaaaatg

SEQ ID NO: 886073 - DNA, 99 bp, Homo sapiens
acagcatctttgtctagccccagtgcagcctccttttagaggactcagaagaagaagaaggtgacttatgtagaatttgtcaaatggcagctgcatcat

SEQ ID NO: 886074 - DNA, 74 bp, Homo sapiens
cagccgcgaggaggcgcgggaggtgttcgagaacgaccccgagacggaacattctggacgtgtgtttcggctcc

SEQ ID NO: 886075 - DNA, 98 bp, Homo sapiens
actggtcttggtagcggaggcacccgaatgctgcccgggtgaggagagccagtgtaactccttcaagactggagtgacacacactgcatctgcatctg

SEQ ID NO: 886076 - DNA, 99 bp, Homo sapiens
atcatgagctacatctccagagtgtctggaggagggaccaaagtccagggatttgtcttggctgttactatgacacgggaagcaattgatgaatttcgg

SEQ ID NO: 886077 - DNA, 99 bp, Homo sapiens
tggagataaagcttctggatttcactatggagttcatgcttgtgaaggatgcaaggagtgtgaggaagaggctgtctgtgtcattatgtgtgcgtcggt

SEQ ID NO: 886078 - DNA, 99 bp, Homo sapiens
gagttgatctctctaaaacgtcaggagtatgcgaccagtggttggaacctgaatgtgatgccagtgctagatcagtctgttctctgtcacatcaatgca

SEQ ID NO: 886079 - DNA, 99 bp, Homo sapiens
gcaagcattgcagtgcagagccctagggcattgcctacaggaagtctggggacatgtgggagccgtagatcatgccactaatcgtacccagtttgggga

SEQ ID NO: 886080 - DNA, 99 bp, Homo sapiens
ggcgctgggctagtgctaggccacttcatagcttcggggatggtcaatcaggatgtgtttcacatggtagttgaagtaccacgctggtctaatgcaaaa

SEQ ID NO: 886081 - DNA, 99 bp, Homo sapiens
ctggtgtggcttctccttggccacatggtagtgtctcaaatggccacactgctggcaagaaagttcccagtgggaaaagctacagaaagatgacacaga

SEQ ID NO: 886082 - DNA, 99 bp, Homo sapiens
cgctggcccggaggctccagaaacgggtcctgctgctcaccaagatggagaaggatgaaactgtgagtgactgctccccacacatagccaacatcgggc

SEQ ID NO: 886083 - DNA, 99 bp, Homo sapiens
caggatcctgcaccgggtggtggctggggagagaaaccctttatctgtgaaatctgtggcaaaagcttcaccagccgccccaacatgaagagacaccgc

SEQ ID NO: 886084 - DNA, 75 bp, Homo sapiens
gtcggactcccgcggcgggaggagcctgttcccctgaggttgcaatgaatgtgtatgagttatcatcagctgccg

SEQ ID NO: 886085 - DNA, 99 bp, Homo sapiens
ccgtcaccttcaaggccgtcagacaagggttctaaccatttagctgttgttcttgatgacattattttagcagttattgactccatttttgtgtggttc

SEQ ID NO: 886086 - DNA, 98 bp, Homo sapiens
gcagttacattttctccaaaagctgtgaccaagataagatgctcccaagtcccttgcagctctcttcagaagaaaaatcactagtgctctgctcttgc

SEQ ID NO: 886087 - DNA, 75 bp, Homo sapiens
caggctcatctgttttctgaagatgggaaaagccctttggacaagtagtttatgccaacgtgacttcattcatac

SEQ ID NO: 886088 - DNA, 76 bp, Homo sapiens
cctggtgtcacctatcagtaaaaggtatcaacttgaactgaaggatgactacatcattagaactaatcgactgatt

SEQ ID NO: 886089 - DNA, 100 bp, Homo sapiens
caggagctgtggggtcccctgctagaagtgggggactcggcggggctgaagccgacgtagcttctctgaacagacgcatccagctggttgaggaagagtt

SEQ ID NO: 886090 - DNA, 99 bp, Homo sapiens
gaacaggcattgtaaaccacatcaccagtttaaagaatctgattgattcagccgttggtctttgaaatttcctgtgatgtgtttcaatctagatgcaaa

SEQ ID NO: 886091 - DNA, 98 bp, Homo sapiens
cgggcgcggcggcggcggcggtggaggagccggagcataatgagatcctgaaggagctagacgagtgctacgagcgcttcagtcgcgagacagacggg

SEQ ID NO: 886092 - DNA, 99 bp, Homo sapiens
aagccgtcctgtgtatggtggtggcaggggccatcgctgccgtctttcacacactgatagaggaggaaggaagagacttgagctgttgtgtagcttctc

SEQ ID NO: 886093 - DNA, 99 bp, Homo sapiens
ttcctttgagcctgaggcccttggtaacctcgtggaggggatggatttccataagttttactttgagaatctgggccgagtacattctatttgccgcgt

SEQ ID NO: 886094 - DNA, 99 bp, Homo sapiens
ccagctcagccagctgcctccgcactccatcgaccagggttttttgccctgacatctcttcgtcttgtgtttttacttgcatttggcttgatgatcatt

SEQ ID NO: 886095 - DNA, 99 bp, Homo sapiens
tgacaactttgcctcaattgtgactggagtagaggaagcaaggaggaagcctgggaagtgcccagtgacttatggccaatgtttgatgcttaacccccc

SEQ ID NO: 886096 - DNA, 75 bp, Homo sapiens
ctcagctacagctactgctacgtgggaatcatgacaggtgatgggcagaatctgtttacgaaagacgtgacagtg

SEQ ID NO: 886097 - DNA, 98 bp, Homo sapiens
gcatatcctgggtagcctctaggaagcgctagacacatgtaaagcttcagcgactgaaggagtgtggactttttgaatttcaagaacagtaaagttgg

SEQ ID NO: 886098 - DNA, 100 bp, Homo sapiens
tttcaacatgcctctgacaatctctagtcgggtgccaaagcctttgtctgtgatcagtgcggtgcacagttttcgaaggaggatgccctggagacacaca

SEQ ID NO: 886099 - DNA, 99 bp, Homo sapiens
gaaaatggcacagaaatggtatcaagaaaccccgatcacaaagatacgaatctcttaaggggctggatcagctcctttgtggcagtaaagcagacactt

SEQ ID NO: 886100 - DNA, 100 bp, Homo sapiens
ctgagttgagacatcagcaagtgctgggcctggaatgtcagaagcagcagctacaggccaaatttgagcaccttaagagacttcaccaagaagagagaat

SEQ ID NO: 886101 - DNA, 76 bp, Homo sapiens
ccaacttcgacgtggatgacgacgtgctgagaaacacggaacctttcacaaccttcttcctcaatgcaaatgatgg

SEQ ID NO: 886102 - DNA, 76 bp, Homo sapiens
gaaaatttggaatgggatggttggagaacttgtatatggggtatctcaacctcctggcacaacatcattttctttg

SEQ ID NO: 886103 - DNA, 100 bp, Homo sapiens
aaagacgtgcggatcctgctggtgggagaacgtgtcatttaggtaccactgtcgattgtacaacgagtggcgtcggaccaatcagagggtgattctcctc

SEQ ID NO: 886104 - DNA, 99 bp, Homo sapiens
agaagaaatccttgctaatggagggagcctgtcacatcaccatggagacaaggcgcctctgtcgaagagccttctgctggtccccagtgccctctccct

SEQ ID NO: 886105 - DNA, 76 bp, Homo sapiens
tggatcctgtccttcatgcagtctctcattggcttctttgagactgaaatggcagatgatgaaacatgcttgggat

SEQ ID NO: 886106 - DNA, 99 bp, Homo sapiens
ttcgacgctacagccacaggattggcccactttccccattcacactcttgaatgtcgtctctcaactagccaaacggaatctgcgactgctggtcctag

SEQ ID NO: 886107 - DNA, 99 bp, Homo sapiens
gtaagtgaagatcttcgttatccatcacgccacagcttatcggtcctgaacgaggctgtgggggccctgatgtaccacaccatcactctcaccagggag

SEQ ID NO: 886108 - DNA, 98 bp, Homo sapiens
atccccacctttgcctcagaaagacctatttcagcatttaaatcaaacggtattgagatggattgggttatgaaacataatggtccaaatgacgctag

SEQ ID NO: 886109 - DNA, 98 bp, Homo sapiens
tgcagaaggtggacggctgggagcaggacttgtcagtacccgagtttccggaagacatagggcctgattacattccaacagaggaagaaaggagagtc

SEQ ID NO: 886110 - DNA, 98 bp, Homo sapiens
aaaggccaagtctccatcccagaagaagcctgtatctaaaaaagcaggaggcaagaaaggggcccggaaatccaagattctactgaaaaattccagct

SEQ ID NO: 886111 - DNA, 98 bp, Homo sapiens
gtagcccagcgccggcacgcgcgaggcccaactacatcaagatcgttcttctcccccacctcctctcccagaaagaactctagagtccttctttcttg

SEQ ID NO: 886112 - DNA, 99 bp, Homo sapiens
cctccaagaagacaaagtctagttcagaggagagtagatccgagatatatgtgcaccagagtggaatcacatagacccccggcggaaggaagaactgga

SEQ ID NO: 886113 - DNA, 99 bp, Homo sapiens
acaggctggctcccgtctccaggccccaaggagccacacctggaccagaccccaggaaaggatccagttcactatcctagccttgcagacaagtatgaa

SEQ ID NO: 886114 - DNA, 76 bp, Homo sapiens
cccggaggcaccacaggactgcagctccccagcacggttcccgtgtggccggtggttagggaagggcatggatgat

SEQ ID NO: 886115 - DNA, 99 bp, Homo sapiens
aaggttcaaaaactaagcatccagaggccctgagcagctttcagcactggagggtttgtggatgcacttagatgtttgcaatgagcactgtggctggca

SEQ ID NO: 886116 - DNA, 76 bp, Homo sapiens
gcctggtgatcggctccttaccagctcacctctcaccgcgcatgtttggaggcctctgagcccaagctaagccatc

SEQ ID NO: 886117 - DNA, 99 bp, Homo sapiens
tggaggctcaacggcagaagcttcaccacaaaagcgaaatgggcacaccacagatgtggatgccctgctgaagaagtctgaggcccagcatgaacagcc

SEQ ID NO: 886118 - DNA, 99 bp, Homo sapiens
atggatgaggatggcttttttgaaggctcttcggcttcgtggcccggaagcagggcagcaccacggacaacgcctgccacctctttgctgagcttgacc

SEQ ID NO: 886119 - DNA, 99 bp, Homo sapiens
aatacccctttgaattaattatggctgtttgaagactgcttcattctgcctctagtaccagcggtttctctgttctgtgatcaatgtgattcacaggaa

SEQ ID NO: 886120 - DNA, 98 bp, Homo sapiens
tcatcaagaagcatgatggacaggatgtttgccctcgaggtgaccaagaatatggcccaggtgaccaaagccctggacaaggccctgagcaccatgga

SEQ ID NO: 886121 - DNA, 76 bp, Homo sapiens
gaatcaacctaagttttaaacagaaggtgaacctctgagaaactaatctggattcactccctctggttgataccca

SEQ ID NO: 886122 - DNA, 99 bp, Homo sapiens
ttggctaaagttcggatgatgaaaggagaaaatctttgccaagaactagaagcaaagttttatgaagggacttttaattgggaaagtgtcaaacagcat

SEQ ID NO: 886123 - DNA, 99 bp, Homo sapiens
tggacagattgctgaccaggggcttgagagctgggttctattttccctcctcaaactgactttgcagccacggagaggatctcactctgtcacccaggc

SEQ ID NO: 886124 - DNA, 100 bp, Homo sapiens
gaggagagctcatcatgtcagctgccatccggctgtccttagagcaagccctgcctcctgagccaaaggaagaaaatgctgagcctgtgagcaaactgcg

SEQ ID NO: 886125 - DNA, 99 bp, Homo sapiens
cgtggattccagaggggtgacagcaaaacgcgcagttgtgtagcagttgagtaatgctggttagctgttaaggtggcgtgttgcagtgcagagtgcttg

SEQ ID NO: 886126 - DNA, 99 bp, Homo sapiens
gccgtggcatgtcgatttgtccttcactacagcctgtgcacgtcgggcgtagttcggcttcacatcaacagctggctggaggtgagcttctgcctgccc

SEQ ID NO: 886127 - DNA, 98 bp, Homo sapiens
ttttgacacaagaacagttggccaatactggtgcccaagcctggattaaaaagatccacaagaaggtgctgtggtggttctccctgcagactctcagc

SEQ ID NO: 886128 - DNA, 98 bp, Homo sapiens
tgttatcaggatgatattaacaggagtgtttttgggcctaggcctgagtggaatcattcctaccttgcactatgtcatctcggaggggttccttaagg

SEQ ID NO: 886129 - DNA, 99 bp, Homo sapiens
tggattctgctcagaggaacttgtactgggatgtgatgatggagaactacagcaacttactctcactgggttctgatggtcctttggctaccagcaaac

SEQ ID NO: 886130 - DNA, 100 bp, Homo sapiens
ctaacagaactgctgggcgaatctgagcaccaactgcacctcaccagaatgttcgtggcatcagagagaaagatgagagctcaccaggtgctcaccttcc

SEQ ID NO: 886131 - DNA, 99 bp, Homo sapiens
tgaagaaggagtacctgagcagcctccagccccgcctcaacagcatcatgcagccaaagaaacttgcctttagcaattttgggaatttgagaaagaaga

SEQ ID NO: 886132 - DNA, 76 bp, Homo sapiens
ggagataaccagcattgagcacaaccgggacctctccttcctgcggttttacaggagattctaaacttgcctcaag

SEQ ID NO: 886133 - DNA, 98 bp, Homo sapiens
gctgccttcacaccccggacatccgcgccacacatatgtgcagcgggggctacagcgagtggggctagatccccagctgccactgaatctggctgccc

SEQ ID NO: 886134 - DNA, 99 bp, Homo sapiens
aatgttttgctagctgctaaaaccacctttgtcaccagaatgaatgaagtgcttcagatttaaatagcatttccggagagttcttttgaagtcacttca

SEQ ID NO: 886135 - DNA, 76 bp, Homo sapiens
gaaaactcaaaaaccatctggtgctgtggattgcaaccttgaatgccacggacacagtcattccctctttaatggt

SEQ ID NO: 886136 - DNA, 98 bp, Homo sapiens
tgaaagcaaccaggaggcagtaaattcttcagctgctcggacagatgaagctccccaaggagctgcaggggctttgttatgcacctaaagccatattg

SEQ ID NO: 886137 - DNA, 74 bp, Homo sapiens
gagattattcagcatgaccagctctccacccactcagaggacgcagacgagctgcagtatctctcttcctgagg

SEQ ID NO: 886138 - DNA, 75 bp, Homo sapiens
agaatttcgatctccgccctggggtcattgtcaggtattgctggccttttcacaattttctcaagttttgtattc

SEQ ID NO: 886139 - DNA, 98 bp, Homo sapiens
gcagccgcctgaaggaacgcgacggcggcgcccgcagtatctccagatgaaatggccactgcttgatgtccaggcagggagcctccagagtagacaag

SEQ ID NO: 886140 - DNA, 98 bp, Homo sapiens
gaggattgactgctgctggggctgggctcgccagtcttggggacagtgtcagcgttttcgaaaggccttacactctgaccgtcctccttctgcatctc

SEQ ID NO: 886141 - DNA, 98 bp, Homo sapiens
gcttctctacgcagaacccgggagtaggagactcagaatcgaatctcttctccctccccttcttgaccattcctcaagaattttgtatccaaggccca

SEQ ID NO: 886142 - DNA, 99 bp, Homo sapiens
cgaagataatcaacctctagccgggcttgttccagatgtccaacatcacagtcacatacagagatggccgagtggcacagctggagcaggtatacatcc

SEQ ID NO: 886143 - DNA, 99 bp, Homo sapiens
gaacattctgccgaagagaacaagacgtgtgaagactcaggaaatccaggatgagtcagctgtgttatggttggatgaaattcaaggtggaatctggca

SEQ ID NO: 886144 - DNA, 98 bp, Homo sapiens
caggattcatgctctacatccccatagagctgtcggcagcatccagcccctccagtcacagtcctcacagagcttcaggaaaggacccctttgcagag

SEQ ID NO: 886145 - DNA, 74 bp, Homo sapiens
ggaaaggagattgacagtcacaattttgtaataagagattcagttgtggaaattctttttgaacaagataatga

SEQ ID NO: 886146 - DNA, 76 bp, Homo sapiens
cagccgcagagcggggaggaggcggtggccctgctggaggagctctgggccagaggaagaggcgtacggcgaggac

SEQ ID NO: 886147 - DNA, 76 bp, Homo sapiens
gaagaggaagaggaaagcaaaggagtcagggatggctcttcctcagataagggcctcgctctgttacccaggctgg

SEQ ID NO: 886148 - DNA, 99 bp, Homo sapiens
aaaacttcagagcaaaacatcactgtaattcttgctgtagaaagcttaaacttccagagattcagaatatacccccctggacaacacggttatcctcaa

SEQ ID NO: 886149 - DNA, 76 bp, Homo sapiens
accccggcccaggcggccttcgagaaaatgcaggagaagcggaaatgattctggggaccattctgaccacatgcat

SEQ ID NO: 886150 - DNA, 98 bp, Homo sapiens
tgttttgggcatgcacgtgatactcacacagtggcttctgctcaccaacagatgaagacagatgcaccaacgaggcacctgaatggacagaagaggac

SEQ ID NO: 886151 - DNA, 99 bp, Homo sapiens
agaaattatattttccagcccgtgtctgcagaggcagttgctgtgggaggtgtggtaactgctggaaggaagatgctcaattcttctgagcaacgaagg

SEQ ID NO: 886152 - DNA, 100 bp, Homo sapiens
cttggaagaaggggttacgctgtttggccgggtaccaaccaagaagctgaagaaatatgagaaagaatatcagacaatgcgagagagtcagctgcaacag

SEQ ID NO: 886153 - DNA, 99 bp, Homo sapiens
ggatatccaaccctgaagatatttagagatggtgaagaagcaggtgcttatgatggacctaggactgctgcattatctacaaattggaagaacacgagg

SEQ ID NO: 886154 - DNA, 99 bp, Homo sapiens
ctgctctccttctacctaattttcaccaatgaggtatttacatgaggaatttccagagtcctggtcagttcccaggttggctgaaggctttgatgtcag

SEQ ID NO: 886155 - DNA, 98 bp, Homo sapiens
ttttatccttttctgtacaacatcacttcttctgtttgcagtggtcccaagtcatttgcaaaggcattttccagtggctatctacttggagaagttct

SEQ ID NO: 886156 - DNA, 98 bp, Homo sapiens
gcgaggtgaccggagtcacagttcccgcaggcggcgacagcagagcgcccactgcctccagcaggaagctctggaggaatatgtgaaaaaagtaaact

SEQ ID NO: 886157 - DNA, 76 bp, Homo sapiens
gctgccatcttcacagctgaaatctcagggcagctcaaatgtggcacctgattttgaaatcggaagtagcatcaag

SEQ ID NO: 886158 - DNA, 98 bp, Homo sapiens
cctgctggaggtctcgcctgggctctctaccctccagaggaatgagaagaacgtagcctcttcctacgctggggaggaggaggaggaagggagcggca

SEQ ID NO: 886159 - DNA, 76 bp, Homo sapiens
actgattctactctgcttttatcctttggagcctgggagactccccaaaaaggccgtcgctttcgggttctctcat

SEQ ID NO: 886160 - DNA, 98 bp, Homo sapiens
gggtgctgctggttagtgtgctctgagggagggtccgagccagccgctgttttgccggaggagcccctcaggccgaatacaaacagaagcttgcacga

SEQ ID NO: 886161 - DNA, 76 bp, Homo sapiens
cgagaacggtgcttctatggcaggatatggtgcatgctattatgatgctaatcagtctatgtatgtgtttggaggc

SEQ ID NO: 886162 - DNA, 98 bp, Homo sapiens
gcgcgtgagcgctggagcttcatccgggcacttcataagggatccgcagctgctcccgctctccagggctgtttaacgacccccaactccccatccat

SEQ ID NO: 886163 - DNA, 100 bp, Homo sapiens
ctccacgaggaggaccagaaggagatcggtgacctccgtgcccagcagcagcaggttatggataaatatggagagttctacggccgagacagaatcagtg

SEQ ID NO: 886164 - DNA, 76 bp, Homo sapiens
ccacgcctggcctcactcaaacagtaaacgagctatttccttcgtgctaccatcagccgccgcctcaatgatgttg

SEQ ID NO: 886165 - DNA, 98 bp, Homo sapiens
gcctcgccatgtcctgctgcccgctggaggagagcaggagtgttcagaagcaaatgaagatcctgcagaagaagcaagcccagattgtgaaagagaaa

SEQ ID NO: 886166 - DNA, 98 bp, Homo sapiens
agaaagagtcaacagcagtggcaacaggaagatgatccctatgatcttgaagatgtttctgcacagaaatgagggaaatacaaagaaccaaatacagt

SEQ ID NO: 886167 - DNA, 99 bp, Homo sapiens
agatcaccaaggcagctgcaaaagctctgagtcagcatccaaccttaaatgatgacctgccaaatcgtatcatttctggcttggtgaaagtgaaaggaa

SEQ ID NO: 886168 - DNA, 99 bp, Homo sapiens
tggctcacgtatttaagagcctgaatattccagatcttaatatttgccagtgatgcctgcaaaaatgtgacattacatgttccctccaaactagatgcc

SEQ ID NO: 886169 - DNA, 100 bp, Homo sapiens
aaggtgctaccgctgacgacacccctggtggatggcgaggatgagagatcagtgtgcgtgtgaccaccatggatgcagagctggagtttgccatccagcc

SEQ ID NO: 886170 - DNA, 98 bp, Homo sapiens
tcgtaaagccgggagtgtcgtaaaccagaattaaacaaccaccatgtcgagcaaaaaggcaaagaccaagaccaccaagaagcgccctcagcgtgcaa

SEQ ID NO: 886171 - DNA, 98 bp, Homo sapiens
gaaaacatgacgtctccagccaaattcaaaaaggataaggagatcatagcagagtacgatactcaggtcaaagcaccgacagtaaatggttcacggcc

SEQ ID NO: 886172 - DNA, 98 bp, Homo sapiens
ggctcacctgtgcgggatggaacaaaagcaaagcgtagaaggttttcctccaaaccagttgtactcacagaagcccagaaacaacttatgatatgcca

SEQ ID NO: 886173 - DNA, 99 bp, Homo sapiens
taagctgagcagagccctgcgatactattatgacaaggctgagcagcaagtctctgctgacatcagatgattatgagctgggagcagggataagaaaga

SEQ ID NO: 886174 - DNA, 100 bp, Homo sapiens
ttgcattaagtaatcctacagcacaggcagagtgcacggctgaagaagcatatacacttacagagattgaagccaagggaacgttgaacggggaaaaggt

SEQ ID NO: 886175 - DNA, 99 bp, Homo sapiens
tggcgacggcggcctacgagcagctgaagctgcacgcttaaaaaggcctcttaagagccttgatggtgctctatatgatgatgaagatgatgatgacat

SEQ ID NO: 886176 - DNA, 99 bp, Homo sapiens
tacccagtgacttgaaggagcctccccagcctcctaggaagagcctaggctggatgtcttgatcaataacgcagggatcttccagtgcccttacatgaa

SEQ ID NO: 886177 - DNA, 99 bp, Homo sapiens
aaaacacctgggatgctccagtgctcttacgcagataatgatcattaacatcagcctctctgatcaaagtaacggcacagccaacaagatgaacggagc

SEQ ID NO: 886178 - DNA, 100 bp, Homo sapiens
ttttttctgggaactacaaacaaacgtgccaaaacagtggttttgcatatagatggccttgatgatacgagctcagagttctacagagtcaccactgaac

SEQ ID NO: 886179 - DNA, 99 bp, Homo sapiens
ggccggcgaaaggagctggtgcctgtgcaagttgttgagctgttgacagatctatgactgccagtctgagtgacgctcgggatgctctagtgaatgcag

SEQ ID NO: 886180 - DNA, 98 bp, Homo sapiens
acagattccccaggctacacattctgtcagtgctgttctccaagaggcccagagacatgctgaaacatcgaagggcttttttgaagaagaagaaggta

SEQ ID NO: 886181 - DNA, 99 bp, Homo sapiens
gtccctggtggacaaggtcaaaccatcatgcaagtacctgtttctggaacacagggtttgcagcaagagccagcaccgctctttgaccttgccatgctt

SEQ ID NO: 886182 - DNA, 98 bp, Homo sapiens
aatgacttcccattatgtgattgccatctttgccctgatgagctcctgtttagccactgcagattcttagatatggcagaggtattgcccccatctgg

SEQ ID NO: 886183 - DNA, 76 bp, Homo sapiens
attcctttgaccgtcttaaaaattgtaccccagagagcttttctttaggaattacatgaatgacagtcttcgaacc

SEQ ID NO: 886184 - DNA, 76 bp, Homo sapiens
atcgggagaaagtggagtccgagctgagatccatctgcaccacggtgctggtacctttaaaacagggcagaagcct

SEQ ID NO: 886185 - DNA, 98 bp, Homo sapiens
agcaaagtccaagcattgtatcacttcatctgcaaatatttcaataagtacccaaaaggttccattacagcttatagaaagtgttgaatgccgagata

SEQ ID NO: 886186 - DNA, 99 bp, Homo sapiens
tgtgagcagtgggaaaaatggaccaacttctttggcaagtggacattttactggctcaaatctgaactcagaagtcaccttcccggccttctctgagaa

SEQ ID NO: 886187 - DNA, 98 bp, Homo sapiens
gaaaaagaaggacgtatgctctacaagatggcagatgatcagggctgtattgaagagcagggggttgaggattcagcaaatgaagattcagtggatgc

SEQ ID NO: 886188 - DNA, 75 bp, Homo sapiens
gccgagggccaccccctggtcctctgccctcgcgccccgctagggccaggaaaaccaattctgtgtcctcggagg

SEQ ID NO: 886189 - DNA, 99 bp, Homo sapiens
acaaaacagcagatttcccaagagcagcggaaaatgatccagtcacaggctgtggatctttccattgatgagtccagcttgacaggtgagacaacgcct

SEQ ID NO: 886190 - DNA, 98 bp, Homo sapiens
tctgaccaagcaactggccagctccacgtacaccattatcctcttgacttgaaccacagtgaaaccttcctgcaaactacaacatttcttcctgaaga

SEQ ID NO: 886191 - DNA, 99 bp, Homo sapiens
cggtttgtcgccagaaggaagatggcggatctggaggagcagttgtctgatgaagagaagacacgatgaggcgagtggtacgacagagcaagtttcggc

SEQ ID NO: 886192 - DNA, 99 bp, Homo sapiens
actccctacttttggccagggccttctgtgccacctgccaagaccagcagatgctggctatgagtttgacatctgcttcacctcagtgcagaagagagc

SEQ ID NO: 886193 - DNA, 76 bp, Homo sapiens
agttttagttgaagttctaaagcagagacttagtgataaaactgggcctgtagctcaagagaaaagttgacacctg

SEQ ID NO: 886194 - DNA, 99 bp, Homo sapiens
aagcctgcctacagttttcacaaatctacagtgctacaaggaggacggcagctccaagagccctgactgccctgtgtgcagccgctccctgaacaagct

SEQ ID NO: 886195 - DNA, 99 bp, Homo sapiens
gctcaccattctcattatttttagatatcgaggatacccagagcttaaagatgactagacattcactttgcaaataattgttgtgactctatgtttgct

SEQ ID NO: 886196 - DNA, 75 bp, Homo sapiens
cgtggtccttctccatattcgaggtgtgatgaatgcagactctgctaccattttggctgtttggatcctcctttg

SEQ ID NO: 886197 - DNA, 98 bp, Homo sapiens
aagtttctgcaggaacacggttcagattcggtgctgtacctggtggagaagggagccgtgatcgagcatgtggaccacagcgggatgcggcccttgga

SEQ ID NO: 886198 - DNA, 99 bp, Homo sapiens
gctaaggctgacacctccaaacccagcacggtaaatgccatctgctatggggccaagattatgcttccaggtgttcttcgatatgaggacggcattgag

SEQ ID NO: 886199 - DNA, 98 bp, Homo sapiens
agggcacgcggcttgaaggactgtgggcagatgtgaccaagagcctgcattaaggttcacagaatgattgcagagttcaagctgatccctggacttaa

SEQ ID NO: 886200 - DNA, 76 bp, Homo sapiens
cagatgcgggccctgctggaccagctcatgggcacggctcgggacggtccctatcactgttcagtccatcgtcatt

SEQ ID NO: 886201 - DNA, 99 bp, Homo sapiens
gcagaaattatattttccagcccgtgtctgcagctattgacctgaaaagtggttctggaaaagtgtaccaaggccctgcaaaaggtgctgctgatacaa

SEQ ID NO: 886202 - DNA, 75 bp, Homo sapiens
atttcagtcagcctcagaggttgacttctacattgataagggtgaagttgaacaaattgctatgatgaaaccaaa

SEQ ID NO: 886203 - DNA, 98 bp, Homo sapiens
cgagggccagctgacggagatggtgcagaagatggaggaggtctctgttctaggatgtcccgacccagtggtgcatgagatcgcctatcagtacggaa

SEQ ID NO: 886204 - DNA, 100 bp, Homo sapiens
gcgggccacgcacctcgtcaccaaggccaagaagtgtatgctgacttgtaaagtgaagaagccagtggtgctgcgggtgttcttttggggtagtgtctgg

SEQ ID NO: 886205 - DNA, 75 bp, Homo sapiens
agactgtggtgcctacccccatcactgcttccctcagccataacagagaccccgcagatgtgtcttcagagagtg

SEQ ID NO: 886206 - DNA, 75 bp, Homo sapiens
aaacaacatcatgcagtggaatgcagttatatttggctgaacttggtgactatgatcttgctgagcatagtcctg

SEQ ID NO: 886207 - DNA, 99 bp, Homo sapiens
ttctaccgctgcggctactgcaagaacgagtcgggcagccgctccaatgacctaatctgggagcctgcaagtgacaacagcctttgcggtccttagaca

SEQ ID NO: 886208 - DNA, 100 bp, Homo sapiens
cagaagcaaagagcaatgaactaacccgggcagtagaggaactacacaaacttttgaaagaagctggtgaagagtcattttctgaggatgaatggaattt

SEQ ID NO: 886209 - DNA, 98 bp, Homo sapiens
gaaagacccagaatatgccaagtatctaaaatatgattctataacagactcttccagaaatgatatgaagaggaaatttgccctgacaatggaatttg

SEQ ID NO: 886210 - DNA, 75 bp, Homo sapiens
cttgggggagccctggagggcgggcttccagtggggggagagcccctggcagctgctgcagaagaatattttgcc

SEQ ID NO: 886211 - DNA, 76 bp, Homo sapiens
gtaaccaatagtactcttgccgctatcatacgccagctgagcagtctgagttcagcctggagaaggaaataaagct

SEQ ID NO: 886212 - DNA, 98 bp, Homo sapiens
tacaagttaacccaggagaagcatttacaataagaagagaagatggacagtttcagtgcattacaggaacctggcttctgtatttaccatgtacctgg

SEQ ID NO: 886213 - DNA, 99 bp, Homo sapiens
cgaagtccccggagaactctaccctggaggagattctggggcagtatcaacggagtctccggggaatcacccttcggtcatcgtgcagcctgggaagag

SEQ ID NO: 886214 - DNA, 100 bp, Homo sapiens
cgcggtcatgggcggctcagcctccagccagctggacgagggcaagtgcgcttacatccgaggtgtcagttgtacccgaggcgttctcagcagcagcaag

SEQ ID NO: 886215 - DNA, 75 bp, Homo sapiens
atccagtgttcaccatcctggccccggaagagacaggctcttgccatgttgcccgggctggtcctgaactgctga

SEQ ID NO: 886216 - DNA, 98 bp, Homo sapiens
cttctgtgggccggaaccttaaagttactccacaggatccgctgaacataggatgttgccacaaaatctacctcgtgtatttttctctttcactcatg

SEQ ID NO: 886217 - DNA, 100 bp, Homo sapiens
ctggcgctggggatccctgctcttcgctctcttcctggctgcgtccctagggggtgaagccagccagttttgacaaagtagcaattcctgaagtgaagga

SEQ ID NO: 886218 - DNA, 98 bp, Homo sapiens
accgtgtgatgcagttgaccaggaaggaatggatccagttcatggtggaggctgaaccaagcggagtcttgctctgtcgcccaggctggagtgcagtg

SEQ ID NO: 886219 - DNA, 98 bp, Homo sapiens
tcatgactgagaaagatatggaattatttcgtgatatccaagaacaagcactgcagaatctacctgttactcgtattttggacaatcttatggagatg

SEQ ID NO: 886220 - DNA, 99 bp, Homo sapiens
atgggtccaggaaaagtgtttggggaattggctattctttacaactgtacccggacagcgaccgtcaagatctattgaagacaatgaagtatatttgcc

SEQ ID NO: 886221 - DNA, 98 bp, Homo sapiens
catcatagtcctccccctcaagtgtgatgctggatcttgccaagcgcagtcgcagtggtaaattccgcctcgtgaccaagtttaaaaaggagaaaaac

SEQ ID NO: 886222 - DNA, 99 bp, Homo sapiens
aagaggaccccgctgctaactcggctacaacatttggcagaggtgtggaaacaggaagagaactagaactggaagtaaagcattgaagatgtgactgaa

SEQ ID NO: 886223 - DNA, 99 bp, Homo sapiens
taactggattgagtccagctcttgggatggttgactatagtcaatggggccaatggagccaagtgtatggaaacccacaacagtatggacagtatatgg

SEQ ID NO: 886224 - DNA, 99 bp, Homo sapiens
aaaaattggaagctccaccacccaccccaggacagctgagatatggaccctttgtggaggagttgtttgaagtgacatcctgttatttccctatcgatt

SEQ ID NO: 886225 - DNA, 100 bp, Homo sapiens
gatgctgctcaccatcagtgaatttaagcccacatatcaggaccgagtggccccgccagagccccggagctatgtggagtctgtggcacggacagcggtg

SEQ ID NO: 886226 - DNA, 100 bp, Homo sapiens
gacagttgtcctgggactgcttgtcttattcctgacctgctatgcagattagcctgaggcctgctcagtcgttcctaatgaataaaaatcaagtgccaaa

SEQ ID NO: 886227 - DNA, 99 bp, Homo sapiens
ccaggtggaccccaagaagaccattcagatgggatctttccggatcaatccagatggcagccagtcagtggtggagaggaatgttacggcatccggagt

SEQ ID NO: 886228 - DNA, 99 bp, Homo sapiens
gctctgatcaagcggatccaagccatgattcccaaggtgctggacgtcattgctcctccttatacctctgacttcgtgcaacttttcctccccatcctg

SEQ ID NO: 886229 - DNA, 98 bp, Homo sapiens
ttgccgcccagaagagccgacagaggcagacacagaaggccgacaccctgcacctgctgaaagtacccatggcagacaagcctggtaacacagtgaat

SEQ ID NO: 886230 - DNA, 98 bp, Homo sapiens
tcccctgctagaagtgggggactcggcggggatgtacagttacccagcacgtgtacctcctcctcctcctattgctcgggctgtagtgccctcgaaac

SEQ ID NO: 886231 - DNA, 99 bp, Homo sapiens
gtcaactccaggcacgaggccagcctgaagttgtacaagatatctccggagcatttggataatgtgacagttggaatgcagtgatgtcgactctttgcc

SEQ ID NO: 886232 - DNA, 76 bp, Homo sapiens
ttaccacttgtgcccatatgatctgtaacatggaggagctggaaaaggtagatgacattaatgctgataagaatat

SEQ ID NO: 886233 - DNA, 99 bp, Homo sapiens
tatgacaacgtctctctgccgtgaatcattcctgcagatgaaaaagtgtgacttggcagctggtcaactttgtagtgtgccaactctttgccttgctag

SEQ ID NO: 886234 - DNA, 99 bp, Homo sapiens
aacataactttagtccaagatgaaagaccacagcaagattctttcattcgtctcctcctagcctgggggaccaggctcgaactgaccctggacatcaaa

SEQ ID NO: 886235 - DNA, 98 bp, Homo sapiens
gaagggagtttgctaaatttgaaaaggagaaaatgaatgccaaatgggacacgaacaagctccaaggattcatctttgatgtggtaacaagccaagct

SEQ ID NO: 886236 - DNA, 100 bp, Homo sapiens
cggcagcaacatggaggaattcgactccgaagacttctctacgtcggaggaggacgaggactacgtgccgtcgggttttcaaaaatacctggcaagaaat

SEQ ID NO: 886237 - DNA, 99 bp, Homo sapiens
ttactgatgggagcaagttgactaccaccagtggagtccaggatgagttactgtaaaatggggaaaggagaaatttgaaggtgtagaattgaatacaga

SEQ ID NO: 886238 - DNA, 99 bp, Homo sapiens
ggtgcaggactccatccaccgctgggagcgccggcgtactctcaacaaggcccgggcctcccgctcctccgtacagcaggcgggtgaaaatgaaagccg

SEQ ID NO: 886239 - DNA, 76 bp, Homo sapiens
gcatggataccaccttctggagattaaagacatgcgtcgggatgtccaggaaatttttcgcatgaccccccacgag

SEQ ID NO: 886240 - DNA, 98 bp, Homo sapiens
ccgactgcaactgctggattgctgcaaggctgagggacgagaacgaggcaagaagttatgaaatggaatggatggggatataatgattctaaattcat

SEQ ID NO: 886241 - DNA, 76 bp, Homo sapiens
ctgctctggcctcgcttgttgctcttcggggactccatcacccagggtgaagttgaacaaattgctatgatgaaac

SEQ ID NO: 886242 - DNA, 98 bp, Homo sapiens
gaatacctcgtatgcaacctcaggcttcagccaagtgcctggaagagctgggatgtctggttgagtcctatggcatgaatgtttgccaaccaacccca

SEQ ID NO: 886243 - DNA, 76 bp, Homo sapiens
cggctcacctgtgcgggatggaacaaaaggtgaagtcccgcttggcttttgggaagcccctggtggagcagggcac

SEQ ID NO: 886244 - DNA, 98 bp, Homo sapiens
aggaactaagatctagagtatctcctcgaggaagtacaactgacccaacatgagtgaagtttcctgcaagaaacgggacgactatttggaatggccag

SEQ ID NO: 886245 - DNA, 99 bp, Homo sapiens
ttgccttgagtcagtgcgccgctctccagcccgcttgaacgcagaaaaagtcctacctggagcgaagcgttaaggaagctgaggacaacatccgggaga

SEQ ID NO: 886246 - DNA, 76 bp, Homo sapiens
caagcaaagggactaccaccagcaggcttttgatgaggccattgctgaacttgatacactgaatgaagactcatac

SEQ ID NO: 886247 - DNA, 99 bp, Homo sapiens
gcccacaagatccagtccccacaggagtgggaggcgatccaggccttgacggaatcagagatcattgatttcttcctgggggcctctctcaaggatgag

SEQ ID NO: 886248 - DNA, 99 bp, Homo sapiens
ctggctgcggagcggcgagggacctcgcagggagccatccgatgcatgtcgggccccaggcctgtggtgctgagcgggccttcgggagctgggaagagc

SEQ ID NO: 886249 - DNA, 98 bp, Homo sapiens
caccaccaccatctccatcacccaccaacaacaccacaataatccacagccaagaaaaagtttggaaaccttcatctagaaagtggtctagcaaagtg

SEQ ID NO: 886250 - DNA, 100 bp, Homo sapiens
cggagcgtcccagctgcgaggagaacacaagcagacattcccaaacattctaaagaagggttacctggagattagaaaggaccatgacagttactggcaa

SEQ ID NO: 886251 - DNA, 99 bp, Homo sapiens
aaataatatttatgaactgaaccctaataaggagccatggagaaaaatggatcttaggttaagtgggcagaccaacatccacctcagcaaaaacttctt

SEQ ID NO: 886252 - DNA, 75 bp, Homo sapiens
cagtgtagccccagtatttactgtggttatcaatactctggctgaccatcatcatcgtgggactgactttggtgg

SEQ ID NO: 886253 - DNA, 99 bp, Homo sapiens
tttttctgttttgcctgaatacatgatttaaacaagagatttccacagaagagtagtgagtcagtcaccctggacctgctgacctacacagacctggag

SEQ ID NO: 886254 - DNA, 99 bp, Homo sapiens
agacagcaatggatagatgccattgaacagcacaagtgggtgaatttgtaagtgatgtcctgctagttccagaaaagtgccagtttttccacaaagagc

SEQ ID NO: 886255 - DNA, 98 bp, Homo sapiens
ccgctgcctgcaccatgtccgccagagccaaaccactgagcatattgttaaactagtggaacaacacggcagtgatatctggtggactcttccccctg

SEQ ID NO: 886256 - DNA, 98 bp, Homo sapiens
aatcacaaggaatgcaagggccacctgttcctcagttccaaccacagagcacaatcattgtggagaagacagttcaagacctcctgaacctgatgcat

SEQ ID NO: 886257 - DNA, 75 bp, Homo sapiens
ggcgagggcgcctacggcatggtgtggtgaatgaaatcctgtgccgttcttcagtctggagtgccttcaaagatc

SEQ ID NO: 886258 - DNA, 100 bp, Homo sapiens
ccacaatcaatacgattggaaccagcacaagtacaagtcagggaagtcaaagatgcatccctgagttcttcctagcaggcaagcagccgtgcaccaatga

SEQ ID NO: 886259 - DNA, 98 bp, Homo sapiens
agaaatgtggacatgctgagtgaattagtccagagctccatgaacctgcctccagacaaggcccggctcctgcggcagtatgacaatgagaagaaatg

SEQ ID NO: 886260 - DNA, 99 bp, Homo sapiens
gaaggacctacctccttggtcaaagctgggatgggttgagccccatatgggggttggcaggcagcagagaggcccctttcaaggtgttcgggtaaagaa

SEQ ID NO: 886261 - DNA, 100 bp, Homo sapiens
tctctctctcttaagaaaggaaaatatcccaaggactaatctgatcgggtcttccttcatgagtcaactgagagttcaaatacaacaattgaggatgaag

SEQ ID NO: 886262 - DNA, 99 bp, Homo sapiens
gaaatggaagcctcccagtctgaattctgtggattttcgtctaaaaataacaagaatgggaggagaagggatgttcacggaagaccagggtgtagatga

SEQ ID NO: 886263 - DNA, 99 bp, Homo sapiens
tgaagaggacctgaactttgtaacagacactgccaaggacctgcctgatgtgcaagagctcatcactcaagtgcggtcagagaagtgctccctgcaggc

SEQ ID NO: 886264 - DNA, 75 bp, Homo sapiens
tcaacgaagatgcagctagtaaaacagaggcttgaaactgtcacagccttatgatgggaaatggagtaaaacaat

SEQ ID NO: 886265 - DNA, 76 bp, Homo sapiens
ttccactcatcctctgagtttgagattgtcaaggccataaaagaacaatggccaatgtacatggtggactatgccg

SEQ ID NO: 886266 - DNA, 99 bp, Homo sapiens
agctcttgcagaaaatccaggacttgtaaacaaatcttgttatgaagatgggcaactccaacaacattgccaccgtggacatctccgcaggcttcgtgg

SEQ ID NO: 886267 - DNA, 99 bp, Homo sapiens
gagaaagaaaagaggctcaagacatgcttaatcactcagaaaaggaatccatcaacagcatcaagtccagactaagcaaaagtgggcacatacaaactc

SEQ ID NO: 886268 - DNA, 98 bp, Homo sapiens
tgacctacactagtcgcgggagccacgcagaggacgccggaacaccctggaagccgagaaatgaaatcgagctatagcagattatcttcgttcaaatg

SEQ ID NO: 886269 - DNA, 99 bp, Homo sapiens
tcagaaagcctccggaatctaaaaagccctcagtaccagagacagaagcagatggattcgtccttttagtcacaatatggagcttccgtttctgccaag

SEQ ID NO: 886270 - DNA, 98 bp, Homo sapiens
gagaattccgcagcccacacgattattcagagctgggagagcttcccccacgatctcctttagaaccagtttgtgaagatgggccctttggcccccca

SEQ ID NO: 886271 - DNA, 99 bp, Homo sapiens
tcggctggagtcggaggcgatatttctaggggtgtacttgttggggtcaggatctttaaatggatgagatggctaccactcagatttccaaagatgagc

SEQ ID NO: 886272 - DNA, 99 bp, Homo sapiens
tgtatggggcaagaacatccgagggtgcctgggaatcggtcgcctggaggaccagtatttcccatggaggcgccagccagcctttgacacctttgatgg

SEQ ID NO: 886273 - DNA, 99 bp, Homo sapiens
atcggcgtggtccacctcgtcctgcgcaggcttctccaagagcagcaccagctctctagcagaagcagaagctcctcctggggtagagacagatcttat

SEQ ID NO: 886274 - DNA, 99 bp, Homo sapiens
gggagtttactggggattctcagcaaggccaacccatggccagcacagacatgatggaataaagactgagcactacaaaacagatcttcattctccaag

SEQ ID NO: 886275 - DNA, 98 bp, Homo sapiens
gaagttataaggttccccatggctcagaattctgcaaatgcagattttgcaaactttgatgcatttggacagtctagtggttcgagtaattttggagg

SEQ ID NO: 886276 - DNA, 74 bp, Homo sapiens
tttactggcaaatagtacttcaagagcacagtcttatgtaaggagggaacctgtatgacaaaatccttcgtcag

SEQ ID NO: 886277 - DNA, 99 bp, Homo sapiens
gaagtgatttgcctcagcttgtactctttgggacatccggaagaaagcagccatccagacatttcagaacacgtaccaggtgttagctgtgaccttcaa

SEQ ID NO: 886278 - DNA, 98 bp, Homo sapiens
gcaaaggtggctaaggacctcaacccaggagttaaaaagaaacatgccaagggacaagtgttatttgacaaagtgtgtgaacacctcaatctcttgga

SEQ ID NO: 886279 - DNA, 98 bp, Homo sapiens
atgttcctgagcttgagatgctaggaagacttggcacttgctctgaaatttggggactgagtacaccaaatacgatagatcagtgggatacaacaggc

SEQ ID NO: 886280 - DNA, 98 bp, Homo sapiens
gagtgttgactgctgcaaggaccaagattgctagtgcaactactgctccatcgatcccttcacatttgtctcctggtttacgagatgtggctcttcgt

SEQ ID NO: 886281 - DNA, 100 bp, Homo sapiens
gtatgctggaaaaagttggaaattggaattttgatatctttctatttgatagactaacaaatgacacagggaatatggaggttctgcacctgtatggaag

SEQ ID NO: 886282 - DNA, 99 bp, Homo sapiens
ggtcaagtacgagagtggccctgacggaggggaggaacgtttagtgggctacagatggcatggcatctaaaaccttacaatgcttgattttcatacaga

SEQ ID NO: 886283 - DNA, 98 bp, Homo sapiens
catgctcaacttcggtgcctctctccagcagactgcgatgaatgatttcggaatcaagaatatggaccaggtagcccctgtggctaacagttacagag

SEQ ID NO: 886284 - DNA, 99 bp, Homo sapiens
gactaccgctggtgggcagaagtgcagcagaccccgaaatgcaggacagctggagcacacattgatgaatcattgttccctgcagctaatatgaatgaa

SEQ ID NO: 886285 - DNA, 98 bp, Homo sapiens
acacaccttcccaaattgccctgactgccattttatctagtgcctccagggctggaattactatggaaagaaagaacatactggtcgtcttgttatag

SEQ ID NO: 886286 - DNA, 76 bp, Homo sapiens
ggagtttgaccgcgttgacgacggctcgcagatgtgttaacagggcacaaccattatgtgatgtgtgctcagttcc

SEQ ID NO: 886287 - DNA, 100 bp, Homo sapiens
aaagcaagctcttctagaagttgcatgaatgtcagcatcatcattcaaagaacaagaaacattctaagaaatctaaaaaacatcataggaaacgttcccg

SEQ ID NO: 886288 - DNA, 98 bp, Homo sapiens
agcagctttcacaaatagtaccaaaggcctatggcatgtctgcgttacctttaaatctgataaaaggcactagaagcgctgcttatgaacgtttggaa

SEQ ID NO: 886289 - DNA, 99 bp, Homo sapiens
tctttttgatgcttttgtcagtgtactggaccctctttcccagctgcccgctcctcagcacccgaagattcgcctgtacaacgcagagcaggtcctgag

SEQ ID NO: 886290 - DNA, 75 bp, Homo sapiens
gctctgtctgcagttctggaccagaatacctcaaacgtctaccattacagtgggatcgaaaattgtacaatttgg

SEQ ID NO: 886291 - DNA, 98 bp, Homo sapiens
gatgaagtcaggataggtgttcttaaacacttgcatgattttctgaagaacactggaactattttggggctgatgagaatcttggtccagtggctgtg

SEQ ID NO: 886292 - DNA, 99 bp, Homo sapiens
tggcgctctgggctgccttcctggcctcctgcttcttcccctaccgcctggtggggcttgccgtgggtttctaagcatgaattgaggaacagaagaagc

SEQ ID NO: 886293 - DNA, 98 bp, Homo sapiens
ggggagaaaattgcacgattaagagagctgatgcttgagcagaaactaatctggattcactccctctggttgatacccactcaaaaaggacacttctg

SEQ ID NO: 886294 - DNA, 99 bp, Homo sapiens
ctcttccccacttccctgcactctcatcgctctcggcctcggcctcggcctccgacacggccctctactggtctatccgcagcgagaagctcgagtggg

SEQ ID NO: 886295 - DNA, 98 bp, Homo sapiens
gcgaatcaagcgggagttcaaggaggtgctgaagagcgaggagggacacagcaggtcaggagagattcaacagcattacctcagcttattacagaagt

SEQ ID NO: 886296 - DNA, 76 bp, Homo sapiens
tggcggcagtcacttgtacagcgccggtcaacatcgcggtcatcaagtactggcagtaaacaagagctctgaaagg

SEQ ID NO: 886297 - DNA, 99 bp, Homo sapiens
ttttgatcgaactggcagacggatatttactgtgatgcaggcccagtgtgtcaaaacagaaactgaattctaccgccgtagtcgcagcgagatagtgga

SEQ ID NO: 886298 - DNA, 98 bp, Homo sapiens
cgatatcagtaagaagagcaaagtaaatgctgtcttttcccaaaagacaggctcttcacctgaaggtccttttggtgtgaaccatggggtggaacttc

SEQ ID NO: 886299 - DNA, 98 bp, Homo sapiens
gcttctgggagccaccgtctgaaggacccttgaacatctgtgaagaaatgactattctgcatggaggcttcttgctggccgagcagctgttccaccct

SEQ ID NO: 886300 - DNA, 98 bp, Homo sapiens
ggctcacctggcggtgcccgaggagtagtcgctggagtccgcgcctccctgggaaggatatggagtaatagtactaaatcccaatgaaaactatattg

SEQ ID NO: 886301 - DNA, 98 bp, Homo sapiens
atgaagcgcaccccgactgccgaggaacgagagcgcgaagctaaggaggctggcaggatgtacagtttttatcacaggtgcaagccgtggcattggca

SEQ ID NO: 886302 - DNA, 98 bp, Homo sapiens
gtatgtgaaggtgaaagtgaatttctctgatagagtcttcaaagctgtttctgacatctgtaagacttttagtatttataacagcaatgatgtagcag

SEQ ID NO: 886303 - DNA, 100 bp, Homo sapiens
ggtctttaacgtgagcccgctgcaggtgtgcggcccagtccgagacagcaggaagagttacaggccaacctggacctgatccaaacctacagaatgcata

SEQ ID NO: 886304 - DNA, 99 bp, Homo sapiens
ctggttcctgcgtgctacggccctgtgggcctgggagctgcctctgaggaacacgccgcagaggctgggaggcggcagaatgcagccagaggagggcac

SEQ ID NO: 886305 - DNA, 98 bp, Homo sapiens
ggctgggctttcctcacccggatattgatgatgttaagaagttcaaaccgggttacctggaagctactcttaattggtttagattatataaggtacca

SEQ ID NO: 886306 - DNA, 99 bp, Homo sapiens
agcctgtataccagcacggccaggagccagatgaccaagatgctccagatgaacatgagtcgcctccacctgaagatgccccattgtacccccattcac

SEQ ID NO: 886307 - DNA, 76 bp, Homo sapiens
cagattcgcagtggtcgcttcttctccttggaacagcatctgttgcagttgcaggtctccttgcagctcttcgaat

SEQ ID NO: 886308 - DNA, 99 bp, Homo sapiens
ccgggacggacaagaccctggtgaaggaggtcgtacaggtctggtgagctgtaccttctttctggcagtgaatggtctgtattcctctagtgatgatgt

SEQ ID NO: 886309 - DNA, 98 bp, Homo sapiens
cgaggaggcagcgcgacctccgcacggtatgcagttttgtgtggctatgtatctgagtttgagggtttacaaaacaaaatcaactatgggcacctctt

SEQ ID NO: 886310 - DNA, 75 bp, Homo sapiens
cggcgcgcccgtccccggcagcgacaatgaggtagatttcgggcagacaacttgaacaagctgaagaacctatgc

SEQ ID NO: 886311 - DNA, 99 bp, Homo sapiens
cccgaggcctgcggtacctgcactccaaaggtgtatttcaccgcgacctcacatccaaggatttacaaaaggtgcaggtatgagcaggtctgaagacta

SEQ ID NO: 886312 - DNA, 98 bp, Homo sapiens
gactttcccgccgagggcccggaccccgaatatgacggtctccaattgagaaacatggcactgtttttcctgcactctacccacctattgctggactt

SEQ ID NO: 886313 - DNA, 100 bp, Homo sapiens
aagattgccttcatggaattgagtccaagtcttatggttctggatcaagaattgctggaatccacaaataccaaactatggccattgaagctgaccttgg

SEQ ID NO: 886314 - DNA, 98 bp, Homo sapiens
cacagctaagatgccaggaccacctggaagcctagaaatgagaaccatggagtctggcagtaccgccgccagtgaggaggcacgcagccttcgagaat

SEQ ID NO: 886315 - DNA, 100 bp, Homo sapiens
cgcctgccgctgccctacggcttctccgccatgcaaggctggcgcgtctccatggagaaagaagagattttatcgacatcgaaagtaaatttgccctaag

SEQ ID NO: 886316 - DNA, 99 bp, Homo sapiens
gggatcttctggaagagactgtgaaagagatggatggtcaagggtgcacaatgcaaatgcagccctgaggatttggctactgcatataacaacaggggg

SEQ ID NO: 886317 - DNA, 75 bp, Homo sapiens
cagcctcccgagttgctgggactacagctcaaatccttttaataaagaagagctgacagctattttgaaatttgg

SEQ ID NO: 886318 - DNA, 99 bp, Homo sapiens
tggaggcccgccagtcgctggaggtgaagatgaacctggaagagcagagccagcagcagattgccatcacgaaagccaaagtggatttctccagtgtgg

SEQ ID NO: 886319 - DNA, 99 bp, Homo sapiens
ctgagggctgtcaacaaggtgaaggacaccccggggctgggcaaggtagttgtcctgggaacccctgcagaagaagatggtggtggcaaaattgattta

SEQ ID NO: 886320 - DNA, 99 bp, Homo sapiens
gagcctgctgccaatggtgtggacaccgcagtgtgcttgaggagacttcagaaacgagaactggccatcatctctcagcaaggtgacatatttgttttt

SEQ ID NO: 886321 - DNA, 76 bp, Homo sapiens
cagaactaaagcgggcaaagttagaccttccagaacctgaatgtgacagtgatgataacatgggtgccaaaaatac

SEQ ID NO: 886322 - DNA, 76 bp, Homo sapiens
atatctagaggaggtacctccaggaaatgtgctaggctcagatgaaggattaccaacgtgaattagaagaagctcg

SEQ ID NO: 886323 - DNA, 100 bp, Homo sapiens
cttttttttttgcggaacctgaaaaattcaagaagttgaaaaacgcttttcacgtcacctggagagatgcacaggagattagcagaggcatttcatatca

SEQ ID NO: 886324 - DNA, 99 bp, Homo sapiens
aaaagacccaataggataactcaagttactgataagccaatggacacgtcagtgttatctgaagaaggaggagagccttttcagaagaaacttcaaagt

SEQ ID NO: 886325 - DNA, 99 bp, Homo sapiens
ccaagagggtgcaggtgatcctgcccaagttgtctaccttcataacaacaatatctctgtagttggatcaagtgacttctgcccacctggacacaacac

SEQ ID NO: 886326 - DNA, 76 bp, Homo sapiens
agaagatggatttttggctgtatgttcagaagctaaaggacttgcaattgtgaccaaatatattacaaagggctgg

SEQ ID NO: 886327 - DNA, 100 bp, Homo sapiens
cttcataatcagcccaagaccacatagagcaaacatgaatgatatttcccaaaaggctgaggcaatgacatttaaccaagtaatccagacggggccagat

SEQ ID NO: 886328 - DNA, 99 bp, Homo sapiens
tgatttctgcatttccatctgagctgaaggaattgaagaatctgcagcagcaatacttacagattaatcaagagatcactgagttacatccactgaagg

SEQ ID NO: 886329 - DNA, 99 bp, Homo sapiens
cggcacaaggacgttctcaagtggggcgatgagaagcacgaggtcccagcaaagtctgatgtttactgtgaggtgtgtgaattcctggtgaaggaggtg

SEQ ID NO: 886330 - DNA, 76 bp, Homo sapiens
cggacatcactttagaccctccacctaattgcagcttggagaacagccatctctggaagaagccatcagaatagcg

SEQ ID NO: 886331 - DNA, 98 bp, Homo sapiens
ccgcgtccgccgattcctcctccttggtcgccgcgtccttggctggcgtgtcatttcttcagatagctccccagctgtggaaaatgagcatcctcaag

SEQ ID NO: 886332 - DNA, 98 bp, Homo sapiens
tcccaaggtgctgggattacaggtagaaacctgtgggttcttgttgtggggcggtttccaaaggaacacagaattgggattccagagttcaaatacgt

SEQ ID NO: 886333 - DNA, 76 bp, Homo sapiens
ggaaaatcgcttggttaaaacctgacacttttaacagcaatagtgcagaatccagaatggatgtcctctttgtagc

SEQ ID NO: 886334 - DNA, 98 bp, Homo sapiens
ccagagcccaggtgcccagaggactttcttccagcttctgctgtccttctttgtggagagcaagatgtgggcgctatctccaactgtctttgcacttc

SEQ ID NO: 886335 - DNA, 99 bp, Homo sapiens
aaaccaacctatacatccgaggattgcaaccaggcactactgaccaagatcttgtcaagctgtgtcagccgcactttgaggtgaatgaccggaaggacc

SEQ ID NO: 886336 - DNA, 98 bp, Homo sapiens
acagtcatccttgaaatgtgtcttttatggggacaagttctatctacaggtactggctcctgtatcacccagctctggagttgaaagagctcttcatt

SEQ ID NO: 886337 - DNA, 99 bp, Homo sapiens
ttggctgtttgcttgagctttttctatcccgtgctcttcgtgctcttcatgttctttggaatggagcccacagtgaccatctccccatccaggacagag

SEQ ID NO: 886338 - DNA, 98 bp, Homo sapiens
tatgatgctgatggtgatggagattttgatgtggatgatgccaaagttttattaggtccagtggtttacgtcttggatcttgcagatagactgatctc

SEQ ID NO: 886339 - DNA, 98 bp, Homo sapiens
ggtggtcttggtctgcctccagctcttggaggcagcagtggtcaaatacaggtttgacccccgtctcatgttcagcaatcgcggcagtgtcaggactc

SEQ ID NO: 886340 - DNA, 100 bp, Homo sapiens
tataatcaggcaattatgtcttctaaaaatattgcacagaacactgagctgaaggttgaagtggagagcttgaaacgagaactccaggacaagaaacagc

SEQ ID NO: 886341 - DNA, 99 bp, Homo sapiens
gcagaggacagaatgaagacagggacagtggcattgctcgatcaggtgttcatcagtaatgggtcattaagtgatgttgtgattgtagttgcggtcaca

SEQ ID NO: 886342 - DNA, 99 bp, Homo sapiens
attcttgcagcccttcaagaaagacttgatggtctggtagaaacaccaacaggatacattgaaaggtatattacagctaatactgacacagaagaacag

SEQ ID NO: 886343 - DNA, 98 bp, Homo sapiens
tctcgttctgcgacttataaaggaccagacaaatcaaattagtggttttgcctcttgttgctgtaccacatagaattcactcaacaagtagaaacgtg

SEQ ID NO: 886344 - DNA, 98 bp, Homo sapiens
aatggttttgcataaacatggagaaaagctctacactggactaagagaagttgttaccgaacatctcataaataagcttttctgggagaagaggctac

SEQ ID NO: 886345 - DNA, 99 bp, Homo sapiens
aaacagaggagttggagttgctactaaaaagagaggtgcctttatctgatgatgatgaaagttacacagaccgatttgggatgttgcccctggatgagc

SEQ ID NO: 886346 - DNA, 99 bp, Homo sapiens
ggaatgtgatcacagagcctatttacccagaagtagtccatatgttttctgaatttccagatcccatgtggggttcagattatgtgcagttgtcaagga

SEQ ID NO: 886347 - DNA, 98 bp, Homo sapiens
acgagtacggagcgcctgcagggacagcctgtgatcagggccaaagcggtcagtgagaaggaagtggactctggaaacgacatttatggcaaccctat

SEQ ID NO: 886348 - DNA, 74 bp, Homo sapiens
gtcaaactcaaaatggcacctgttcctcttgatgattctaacaggacctgatcttcaggtttgcatatccaaaa

SEQ ID NO: 886349 - DNA, 99 bp, Homo sapiens
ggagaaacagctgtgtgtgataatggggacttggtcaggtactttcagggcctgggccccccaccgaagttccaggtaacactgaatttctgggaagag

SEQ ID NO: 886350 - DNA, 99 bp, Homo sapiens
tgatggtgaagctaaagaaatttctacacctacccattggtctaaacttgatccaaagacaatgaagcatcctgatcaggtttatctccaaccccatgg

SEQ ID NO: 886351 - DNA, 98 bp, Homo sapiens
aggtcttgatgaacatattaatgtcagccccaaagctgtcaaaaacactgatggcagataaacactgttgatgtgttaactacgatgggagctattcc

SEQ ID NO: 886352 - DNA, 99 bp, Homo sapiens
tgaaaaagtatcgtcgagaagcctatcatcggtatctggccaggaacagtcttcacggggacaaagaattttatctattccaatttggcccccaaacct

SEQ ID NO: 886353 - DNA, 99 bp, Homo sapiens
gcgtgggaacccaggccccgccgaggcggccaggactgactgcattgcacagatgatggatatttacgtatgtttgaaacgaccatcctggatggtgga

SEQ ID NO: 886354 - DNA, 76 bp, Homo sapiens
actgaaaggaaatcaagaaggcattttcagggcaaatttattcggatcaactttgatgtaactggctatatcgttg

SEQ ID NO: 886355 - DNA, 99 bp, Homo sapiens
ccagtaagaacgaggaggatgaaggggccgttgctccagggagaactgcaaatatcttcatccacccccacatttaaaaacgcagttggagataaatgg

SEQ ID NO: 886356 - DNA, 98 bp, Homo sapiens
ggcacagcccgcgcacggcttggcagcccagcgggacccagggagaaacaggggggcgagaagagaaacagagaagcctgtgtctcccaaatcaggaa

SEQ ID NO: 886357 - DNA, 99 bp, Homo sapiens
cgccttcgaattccttgacaatgaacgcgagttcatcagccgcgagctgcggggccagcacctgccagcctgggtaatctgtaagtcagatgctccaac

SEQ ID NO: 886358 - DNA, 98 bp, Homo sapiens
tgatttcagtggaataaatggcgtccaaagtcacagatgctatagtctggtatcaaaagaagactgaagcgttcccggctgaaggtgaggttctgcac

SEQ ID NO: 886359 - DNA, 99 bp, Homo sapiens
tccatggacacacgcagctgggagggcacgaagcccccggcaaagaggctgggaggcggcagaatgcagccagaggagggcacaggctggctgctggag

SEQ ID NO: 886360 - DNA, 98 bp, Homo sapiens
accgatacttaggccagcccagcccctttacacacccacacctcctcagaccaggtgactgctggctgctggcagccattgcctccctcaccttgaat

SEQ ID NO: 886361 - DNA, 99 bp, Homo sapiens
tgaaatcagctcgagacatgtgggctgattacatcctggctaagtcctatcagccatggaaacaccattgctctcttcttccggtcactgttgccaaac

SEQ ID NO: 886362 - DNA, 99 bp, Homo sapiens
tcgcctggaggaagccggaggcctgcgtggaggaggcgccccgcgcagctggctggcggagcatgagcgccccagccagcgtcccatgctcggtggccc

SEQ ID NO: 886363 - DNA, 100 bp, Homo sapiens
gatatggagcaactgctttcacaggggcaccagtatgaaaacccatggacaatcccgaatatgttgtcaatgacgagaattggcttggccccagttctgg

SEQ ID NO: 886364 - DNA, 99 bp, Homo sapiens
atggcccccggtgcaagaggcgcaaacaagccaatcccaggaggaaaaacggttctcttgctgcaaatggccctaccaccttggttgataaagtttcaa

SEQ ID NO: 886365 - DNA, 98 bp, Homo sapiens
gggacaacaggcaggagaattatgggagcgcatttccccaggatatgaaaaacagtagctccgtatcgaatacattgacaaatggatgtgtcatcaat

SEQ ID NO: 886366 - DNA, 99 bp, Homo sapiens
atggagttgagctgcagcgaagcacctctttaccgccctcacaaagccaatgctgaggagatgaccaagtaccacagcgatgactacattaaattcttg

SEQ ID NO: 886367 - DNA, 76 bp, Homo sapiens
gtggcctgtggcgctaaccacacgggatcaagcatgaattgcaagcaaactgctacgaggaggtcaaggaccgctg

SEQ ID NO: 886368 - DNA, 100 bp, Homo sapiens
cttggaagttctaatcggatctggctataatacccctgctgacatttggagcacggcatgcatgtggtctcacgtgtgaaacatggctacagattggctg

SEQ ID NO: 886369 - DNA, 99 bp, Homo sapiens
gaaaattagatctcctgtgtaagactagccacctttctgatacaggcaatgtctacttcgatctgaagtctagaggagacaagtatggcaaattggtcg

SEQ ID NO: 886370 - DNA, 99 bp, Homo sapiens
tcagaaggagtggacttgattgatatatatgctgacgaggagttcaaccagtgtgactatgaaaatgttccaaccactgtatttactcctttggaatat

SEQ ID NO: 886371 - DNA, 98 bp, Homo sapiens
tgtgtcttcaccatcgtccttcacaatgaaaacaaatacactgagcacatcggtgcctaattcctattacccagctcttgaggatgacgattgccaaa

SEQ ID NO: 886372 - DNA, 99 bp, Homo sapiens
agaagcgggcctcccgcctccagcaggacaatattcgcacccggctgaaggagcatcagatccatgctgctgctgactcggagccccacagcttggcac

SEQ ID NO: 886373 - DNA, 100 bp, Homo sapiens
cgcggagccggagggcgggaggaacatgacatcgcggagcggtttccaacctagatgaggaaagccgatggacagtccactacactgccccgtggcacca

SEQ ID NO: 886374 - DNA, 76 bp, Homo sapiens
caagaggaccctgcggactactgcaaagcaaaaaatcccagaagtgggatgaaatgaacatcttggcgacgtatca

SEQ ID NO: 886375 - DNA, 100 bp, Homo sapiens
taccagaggtggaagtccaagtcaaacgcagaaggactgcctcactgagcaaccaagagaaaaatttgagggactgtttcggacttatgatgactgtgtg

SEQ ID NO: 886376 - DNA, 75 bp, Homo sapiens
ggatgccaatctgaatatcaaaatagcaggggagccctggaagcttatgttcaatcagtgagaagtagagaaggc

SEQ ID NO: 886377 - DNA, 99 bp, Homo sapiens
gccaattaaaactgtaggtgtgcaggctgcccttttcttgggcctgggggtgttgttctccttggtcagcattcccttggtcatctatgactgggcctg

SEQ ID NO: 886378 - DNA, 98 bp, Homo sapiens
agcaagttcaccaacagctgccacctctacctgtggctgttcctcctgctgctgcccctggccctgcacctggtgaaaagaacggaggggagcccgat

SEQ ID NO: 886379 - DNA, 99 bp, Homo sapiens
ctgggcgcgtcagaacaggcgctgcggctgatcatctccatcttcctgggcaaaatttggtttctctaatattactggaattgattactctccttctgc

SEQ ID NO: 886380 - DNA, 74 bp, Homo sapiens
ccgggtgtcggctccggcgggacgggcggttctgcgtacccctctccacagggcctcactctattgcccaggct

SEQ ID NO: 886381 - DNA, 98 bp, Homo sapiens
gaatgccaggcactgtttgccgtgccaccctgagtgtcagccccagaatggctcagtgacctgttttggaccgtattcaagtcaaacaacgttgaaat

SEQ ID NO: 886382 - DNA, 98 bp, Homo sapiens
ggacatcgagcctgagggaggggaaaggcgcaggaacccttaggagaaatcttgagagtggacagcaattgtgaagatcgccagagagttctgtgttt

SEQ ID NO: 886383 - DNA, 99 bp, Homo sapiens
ttgctctttggaccacattgtcaattcacaccggtggctgactgttcttgggatgaaacaataaagatctatgaccctgcttgtcttactattcctgct

SEQ ID NO: 886384 - DNA, 76 bp, Homo sapiens
gactgtccttcggacaagttttaggaggatttgttggtattgaggaaaacggtgaaatcctttttggctgtttgcc

SEQ ID NO: 886385 - DNA, 99 bp, Homo sapiens
gattatcgagtagttaaccaatttgccagacattatcagactggacagaccatgcatggaattttggagagaagcaaattttgcaaagatatgacggta

SEQ ID NO: 886386 - DNA, 98 bp, Homo sapiens
ggtgttgaaaaagactgggaatgagcaagaatggaagatcaagctgcaagtgcttggtcagtgtgagaagaagattgtttctgagcttgagaagcttc

SEQ ID NO: 886387 - DNA, 98 bp, Homo sapiens
ggcaaggaaagcagcatagagaatgagatagccgtcctgagaaagtggccttggataagggctgctcccaattccgcctggccgtcctggactggaac

SEQ ID NO: 886388 - DNA, 99 bp, Homo sapiens
agtaaaacaaggtgcagagaatatgatacagatgtattcaaatggatcttcaaagattgctagtgcaactactgctccatcgatcccttcacatttgtc

SEQ ID NO: 886389 - DNA, 100 bp, Homo sapiens
aaaataaccacttaccccttctcaccgaggaagagcgggagaaagggatatttggccttgacattaaaggcagagactgtggcaatgaggcagctaagtg

SEQ ID NO: 886390 - DNA, 99 bp, Homo sapiens
ggagcggctgctcaccatgtcctgcagtgacaagattgcacgggaaacagtgcttcttagtcctacgtcagcagcagtttaatgtccaggctcttgtgg

SEQ ID NO: 886391 - DNA, 99 bp, Homo sapiens
tccagcagtacccctggaaccagggaggaggcaggagagagcccactccagttctacgtgaactaccccaacagtggaagtgtttctgcatacggtcca

SEQ ID NO: 886392 - DNA, 98 bp, Homo sapiens
gaggggagtggaaaggctctcagtgaaaaaggatattttgctcatcaacctcattatagaacatatgatttgtgatacagatcctgaacttggaggag

SEQ ID NO: 886393 - DNA, 99 bp, Homo sapiens
gtgccatggctgagtcacacctgctgcagtggctgctgctgctgctgcccacgctctgtggcccaggcactggtacaggtttgcagattccgccagcag

SEQ ID NO: 886394 - DNA, 99 bp, Homo sapiens
caagtacatatgatttcagctgcaatggcagaacatccatgatagcagtcttctgtaaatcgaacttttcaagaattctctgaaggaaccaagtaggat

SEQ ID NO: 886395 - DNA, 99 bp, Homo sapiens
ccggagcttctcagaagacagagggttttcttttgagggctgatcccttatccaacatggttctaaccttcagtactaaagaagatgcagtttcctttg

SEQ ID NO: 886396 - DNA, 99 bp, Homo sapiens
tcctttccaaacttggtgtcttttctacaaactctgtgcctcaacaaccatttctaagtgattcagctgtgtcccctccagtccgggatgttggtatga

SEQ ID NO: 886397 - DNA, 99 bp, Homo sapiens
acccagccacctgcctccacgtctggaataatgggtactctttcctcgtggaatttgaagattctacagataaatcagaatgaaattccacaattagtt

SEQ ID NO: 886398 - DNA, 75 bp, Homo sapiens
cctcgctggtgaagacccagaggaaatgattcgcctttgccagtctcatctcgtgtctgctttgttaagttccat

SEQ ID NO: 886399 - DNA, 99 bp, Homo sapiens
atggctagcaggaatgcttactgttgcgtggttcgttattaacagatttggagcaagaggtggtggtggccttcccccgaagaaatttggtaatcctgg

SEQ ID NO: 886400 - DNA, 75 bp, Homo sapiens
ctggagtgttccgaggcccttatccccttggcattgatcctatcttgcaggagagagagttactgcctgtgaaga

SEQ ID NO: 886401 - DNA, 99 bp, Homo sapiens
ttagctgtgagaatgacttctattcagtgcaagctctatcagtactacttagatcacttaacaggttggtgacatcgtgaaagtcacaaggatgaatat

SEQ ID NO: 886402 - DNA, 99 bp, Homo sapiens
ggacatctctcagggtgccggcaccatgaagatctggacttcggagcacgtctttgagtgacttaagagattaaaattaatttggttgctgttggttct

SEQ ID NO: 886403 - DNA, 99 bp, Homo sapiens
tgagatccaaaggcagggcaaggaaactggccacaagaataagacgagttggaagaagacctgatcaacaacttcagggtgaagggaaaataattgata

SEQ ID NO: 886404 - DNA, 98 bp, Homo sapiens
tctgggtcctcggtcggtacagtctctgcacctcgcgccccagcaggcaaagatgccttttgatgccaacaaactgtattgcagtgaagtgctggcca

SEQ ID NO: 886405 - DNA, 98 bp, Homo sapiens
ttgaaaatgctgcacatcccttaatagtcatctacatagatcttagacgaattttacaatgtgaagttctgcatagatgccagtcaaccagatgttgg

SEQ ID NO: 886406 - DNA, 99 bp, Homo sapiens
ggcaccccattctggatggcacccgaggtcatcaaacagtcggcctatgactcgaagagtatctgactgtcttctctcagatgattgcatttcatgatc

SEQ ID NO: 886407 - DNA, 76 bp, Homo sapiens
aaagaaggaggagactgtagcaaagttccgttctggaaaggcacccatccttattgctacagatgtagcctcccgt

SEQ ID NO: 886408 - DNA, 76 bp, Homo sapiens
ggcaagttccgggccgcgctgcgagactacgagacggacacagaatttccaggtgttgtggtgcgaccaattggtg

SEQ ID NO: 886409 - DNA, 99 bp, Homo sapiens
gcgtcccccgggggcccgtactgcacatcgtggtggtcggatttcaccacaagaagggctgccaggacttaaccaccaccatgtcgagcaaaagaacaa

SEQ ID NO: 886410 - DNA, 76 bp, Homo sapiens
gccccatcgtggattccaagacatccctgctgagagagccaagcttttgcctctaatgacagagcagctacagtgg

SEQ ID NO: 886411 - DNA, 98 bp, Homo sapiens
tggagtcgagtctagaattcacacagagccacctaggttcaacgccctctagatcgcctgttctcctctattgtcaccgttgctgaacaaaagtatca

SEQ ID NO: 886412 - DNA, 98 bp, Homo sapiens
accccgaggccgcccccaaaaggaaactgtcatcgataggaatacaaatctctttcactgggcctgcctcaatgaacgtgctgcccagctaccccgaa

SEQ ID NO: 886413 - DNA, 98 bp, Homo sapiens
tcaggtcctgaagagcatcagcgtcatcgacagccccggcatcctttctggggagaagcagcgcatcagccgaggcacagctgctttggaagaagatg

SEQ ID NO: 886414 - DNA, 76 bp, Homo sapiens
atgattaccaccaggagattgcaagccaggaaatgtgaagaattcacctggaactaagtagaaaactccatgctct

SEQ ID NO: 886415 - DNA, 99 bp, Homo sapiens
tgttattgatcttcgctgtaacccaagaacaagttcatttatatgagatgattgagacagatgaggacttcaatccttttcctggaggatatgactatt

SEQ ID NO: 886416 - DNA, 76 bp, Homo sapiens
gtggaattctccgtccctttccagggagggaacaaagcccacagcaccggtatcagacttggtgataattctgaat

SEQ ID NO: 886417 - DNA, 99 bp, Homo sapiens
tctgaggcggcgagagatggtcaggtctggagctcgaccgggccagataactgaactgcttaatgatgtggaaagattaaaacaggcactcaatggcct

SEQ ID NO: 886418 - DNA, 76 bp, Homo sapiens
accagctgcaaagttcctatggatcacttggccaggtgcgtcagcaatttcctgctcctcttggttggtcaggcac

SEQ ID NO: 886419 - DNA, 99 bp, Homo sapiens
tgacgggtgaagctgccctgcggggcacgacgctgcagtcgctgggcctgaccgggggcagcgccaccatcaggtgaccagaagtcagcagcttcccag

SEQ ID NO: 886420 - DNA, 99 bp, Homo sapiens
tcgcctcctcgcagcagcgccatgggacatctctacaccgttcccatccgggaacagggcaacatctacaagcccaacaacaaggccatggcagacgag

SEQ ID NO: 886421 - DNA, 99 bp, Homo sapiens
tccagtaacactcaagcaaagaagagttgagcacaatcaggtgaaggtaggcaatgaagttgctacaggaacaggacctaataaaaagatagccaaaaa

SEQ ID NO: 886422 - DNA, 75 bp, Homo sapiens
gaccttttgggcaaggatcagacacaaaggttagaggtcctgggaactccaacaagggagcaaatcagagaaatg

SEQ ID NO: 886423 - DNA, 98 bp, Homo sapiens
ttcctgatctctctcgctgtgagacatgtctgagactcctgctcagtgtagcattaagccaaaagcgtttgaacaatacttgaatctggaagatggca

SEQ ID NO: 886424 - DNA, 98 bp, Homo sapiens
gaaactctggataagtgtttcgaaaatgtgtgtgaattggatttgatcttccatatggataaggtgctatacttggtagatcagaaactcaggagtgt

SEQ ID NO: 886425 - DNA, 99 bp, Homo sapiens
tgtcttcagccattttcaaaaccttgttctataatactttgtgctgggcaagagggatctaagacactctgacctggtcacagccagagacacttggaa

SEQ ID NO: 886426 - DNA, 98 bp, Homo sapiens
caagaccaaggtcaacaaggacaacaatgagatcgtggacaagatcatgggcaaaggacagatccaggcacatctccctaacacttcctgccaccttc

SEQ ID NO: 886427 - DNA, 76 bp, Homo sapiens
gagaacttcaaccaggcactcaaggacagtcattttgtttactcattcagccctgttgcaggtcccaataaactct

SEQ ID NO: 886428 - DNA, 76 bp, Homo sapiens
actgactgctgtagttcagaagaggtttggctttccagagggcagtgtagaggttttcctttggaatatggataaa

SEQ ID NO: 886429 - DNA, 76 bp, Homo sapiens
aagatcctcttcagaaataccactatcttcctgaagtggagtacgagagcctgtacacgagccacatctggatccc

SEQ ID NO: 886430 - DNA, 99 bp, Homo sapiens
tcttcgagaggataatgcctactgtgaagacttaattcagtgcacaaatgagatgaatgtgaacatcccacagttggcagacagtttatttgaaagaac

SEQ ID NO: 886431 - DNA, 98 bp, Homo sapiens
ttgaagaaatccatgccatgaaggaaatttatcagtggtgtggttcctcgtgcaacaaatatgaacgtctgaaggcaaaccaggtagctactggcatt

SEQ ID NO: 886432 - DNA, 98 bp, Homo sapiens
tcgaagaacagctgtggaaagaagttgcaaaacactggatacatcgagatatttccaagcagaaggaatgaagttcgaacacatgtcggttcttataa

SEQ ID NO: 886433 - DNA, 98 bp, Homo sapiens
tgaagaagtgaagaaattattggtacctgcagctatggagttactagtagagaaagcaatcagcagtgcttctagccctcagagccctggggatgcac

SEQ ID NO: 886434 - DNA, 75 bp, Homo sapiens
ccatcgacctcaaggacatcaacttccggccgcagatgtcccagatatggccgcgtggaaagtgtcaaaattctt

SEQ ID NO: 886435 - DNA, 100 bp, Homo sapiens
gccagtcagaatccagttcccatcccgccttgagccagtcaccaatgccacaggaaagaggatttgctcgaatatttgggtacccagtaggtatcgttgg

SEQ ID NO: 886436 - DNA, 100 bp, Homo sapiens
ataccacaagttgaaatacgggacagaattgaatcagggagatatgaagcctccaagctatgattctgtgtatgtggtagaagaccaaagaagagatgag

SEQ ID NO: 886437 - DNA, 99 bp, Homo sapiens
cgagatgtctcgctccgtggccttagctgtgctcgcgctactctctctttctggcctggaggctatccagcaacattcctgatgtagatgaagaaggct

SEQ ID NO: 886438 - DNA, 76 bp, Homo sapiens
gtggtgatgcagtcaaatgatgttgacatctactactacatggatgagccaggtaataaaaggcctgacatatctg

SEQ ID NO: 886439 - DNA, 76 bp, Homo sapiens
cttggacctcgagcagagtgggactcttctggaagtcggcacctatgaagacaagttgtacaattgtgtttatctc

SEQ ID NO: 886440 - DNA, 100 bp, Homo sapiens
cgcaggagaaaatcgagacctcaagtaatcattcccaaatcaatatgcttctcaattttaaggatgacaaaagtgaatgtccatgtccagaagaaattcg

SEQ ID NO: 886441 - DNA, 99 bp, Homo sapiens
cacattggcaggggccctcctcgccctgtatctggctcgatgaagtgatcaaagtccgaacagataccaaattagacttcaacctagaaaagagcagag

SEQ ID NO: 886442 - DNA, 76 bp, Homo sapiens
gggggcccgtctgggccagccacctggtgtccggccacggcagagacaacgtgtgtaccccaagtgcacatggctg

SEQ ID NO: 886443 - DNA, 99 bp, Homo sapiens
ccaagcattttcatgaaacaaccccaaataaaggaagtggaaccacttcagaaccctcgcttgcaacatatcaccatattattcgcctgtttgatcaac

SEQ ID NO: 886444 - DNA, 99 bp, Homo sapiens
gatagtaccatgatagctgtatcaggtgctcaggaacggatagatagcttgcgtcgaactggggtgatccatgaaaaacagacagctgtgtcagtagaa

SEQ ID NO: 886445 - DNA, 99 bp, Homo sapiens
tctctagaccataaaaataaaaaacatatccgagggtgtcctgttacttccaagtcatcaccagaaagatctgaaactcagcaccgaggctctgctccc

SEQ ID NO: 886446 - DNA, 99 bp, Homo sapiens
ttagctgaaaacatcatcgttttgaagagttctgcgttttgccagtcacctctcaactgtgtgccaaagatcaacctggatgccttccttcacaataat

SEQ ID NO: 886447 - DNA, 99 bp, Homo sapiens
gagattatagctctgtatgagaaggacaacacctacttagcggagcgtgctttggacaccatgaattttgatgttataaagggcaagccagtacgcatc

SEQ ID NO: 886448 - DNA, 99 bp, Homo sapiens
gggtggataccgtcaagctggccaagcacaaagagcttgctccctacgatgagaactggttctacacgcgagctggtgttgggatggccaccaactggg

SEQ ID NO: 886449 - DNA, 100 bp, Homo sapiens
ccgcgacctgctcctggacccagcctgggagaagcagcagaggaagcatccagtcctggatgagccaatagctgaagctgtctgtattatcgcagacacg

SEQ ID NO: 886450 - DNA, 76 bp, Homo sapiens
ctggagagcttcatcaaaaatagtgatagctttgataatatcaccttttgccatgatagcatttctttcattggac

SEQ ID NO: 886451 - DNA, 98 bp, Homo sapiens
gcatggcagtgaagaacatggacctttggtatgaaagttttcaagacgcctacaagtggaaaatgcactcctcccagccaaatcaagcttcgccagat

SEQ ID NO: 886452 - DNA, 100 bp, Homo sapiens
cggcggcccagctctctctgacacaggcctgaaagtaagcaggagccagtgaaaacagaaatgggtcctccaccatctccagcatccacgtgtagtgatg

SEQ ID NO: 886453 - DNA, 76 bp, Homo sapiens
gctgtccaaaggacgctagctgttgcacctgttcctccctgcgcgtaagatgccccagtcagctccgtggctcttc

SEQ ID NO: 886454 - DNA, 98 bp, Homo sapiens
agcggcttcctctccatcctctacagcatcggcagcaagcctctgcaaatctgggacaaaaagctgccaatttgtggtgtctgaagaccaagactaca

SEQ ID NO: 886455 - DNA, 98 bp, Homo sapiens
gccctgctactgctggattagcgccagcacttattttagaggagattgcaattgattgtcataataaggaaactgaacagaggctgcttcaagaagct

SEQ ID NO: 886456 - DNA, 99 bp, Homo sapiens
ctatatactttggttacctatgtacctgttaccactttcaaaagacacttcacggccatggtatggaagaacaccaagaagatgggcgtggggaaggcg

SEQ ID NO: 886457 - DNA, 75 bp, Homo sapiens
gtgacagtaacagtacttgggatcccccagttccaaagtgtcttaaaggatgtgatggagctgcttgaagaagat

SEQ ID NO: 886458 - DNA, 99 bp, Homo sapiens
aagctggtattgaacaagaaggatattggttgccaggagatgagattctgtatgcaggagctattcttgaagtttgtggatgaaaattgggaaggttcc

SEQ ID NO: 886459 - DNA, 75 bp, Homo sapiens
tcgagccccgtggaatcccgcggcccccagccagagccagcatgcagaacattacatccttaatgttcagtcaag

SEQ ID NO: 886460 - DNA, 100 bp, Homo sapiens
ccaaggatgaaggacccaaggattcttctgcacagtcagtatcctcgggagttcgtgcaccatctcctgccccatcatcagtaccgttagggtcagaaaa

SEQ ID NO: 886461 - DNA, 99 bp, Homo sapiens
accatggctgcggcggcccagctctctctgacacagcaggtagcatctaaaggaactggtttaaatcctaatgccaaagtatggcaagaaattgctcct

SEQ ID NO: 886462 - DNA, 98 bp, Homo sapiens
gttaaaaactttatgattcagggtggggacttcagtgaagaatctttggaagaactaccagaaacgagtgggaaaacaacccggagattcttctttaa

SEQ ID NO: 886463 - DNA, 99 bp, Homo sapiens
gcggatggccccaggtgtaagcgcagaaagcaggcgaacccgcggcgcaataacgcatccatcatctggagaaaaactaaaatacaaccagcaagggga

SEQ ID NO: 886464 - DNA, 100 bp, Homo sapiens
attttccctcctcaaactgactttgcagccacggagagctaatcttccagtaccaacaattgcagcaatagatggactcgctttaggtggtggtcttgaa

SEQ ID NO: 886465 - DNA, 98 bp, Homo sapiens
tggcaggcgtgctggccggcgtggagagccgccagggctctatcaaggggctggtgtactccagcaacttccaggctaactcaggtgagatggagccg

SEQ ID NO: 886466 - DNA, 99 bp, Homo sapiens
tgaggcctccccagccatgtggaactgttcagccctatgtagctacaacctaaagccttctgaatacactacatctccaaaatcttctgttctctgccc

SEQ ID NO: 886467 - DNA, 98 bp, Homo sapiens
gttgtgattagcataaattccctgggccaattatactttgagcatctacagattcttcacaaacaaaggcatctccttggaaacaatgccatctttga

SEQ ID NO: 886468 - DNA, 76 bp, Homo sapiens
gagggcaggcctgtcttgcatctgtttctccaccacctagcctggaatatatagaaacggggtttcaccatgttgg

SEQ ID NO: 886469 - DNA, 76 bp, Homo sapiens
caggagatcctgcatagccttcacagagagtccagttgccaagattttaatgtgcccagaacatgaaacagagaga

SEQ ID NO: 886470 - DNA, 76 bp, Homo sapiens
catccaatggatgcaggaaaactggattgctgtcacgtctaatgtggctgctgcctcgtgtcacatctgaaactca

SEQ ID NO: 886471 - DNA, 99 bp, Homo sapiens
gaaccaaatcacaataagtctttagctgcaggtgtgtggggtgttggagcgggccggagagaagtagagtgggctgcgaggagaaggaaacaggccttt

SEQ ID NO: 886472 - DNA, 99 bp, Homo sapiens
ttggaactggcttagcgcacccatcccaccttcccgcaccctgggaccggatctctatgaagcaccagaattatcagtgaagaatatattaaatggctc

SEQ ID NO: 886473 - DNA, 100 bp, Homo sapiens
agagtgggggaaacaagaagagcgatggtgtgaagtaatctatgccagcaattatgacaatgttagcagaccatgcagctcgtcagctgcttgatttcag

SEQ ID NO: 886474 - DNA, 98 bp, Homo sapiens
ggacctgcggggctaagctggcacgtcacttccgactagtggagtttttagccttttaacattcaaggattaggcctatgaaaggaggttccctacat

SEQ ID NO: 886475 - DNA, 76 bp, Homo sapiens
gaaatatccaaacaggccctccagaatgagctggagagactgaaagagttgcctgtgggcctggcacccacttcgg

SEQ ID NO: 886476 - DNA, 99 bp, Homo sapiens
tgtggtgactcatctcgcacgtgacccccctccctcttcaagattcccaacttcttctggagcctggggatcggtcacactggtgcgtggtggcatact

SEQ ID NO: 886477 - DNA, 98 bp, Homo sapiens
ggagaccatgttccgagcggcggctccggggcagctccggcgggcggttgatgataattagaagcatgctttccactgaacttcccgacaacatttgt

SEQ ID NO: 886478 - DNA, 75 bp, Homo sapiens
gtgcagtaccgcaggcattttctggtggacaacagtgtgtttcatggagtcacccacttgcaatctgttccctgc

SEQ ID NO: 886479 - DNA, 100 bp, Homo sapiens
gtgaggacgctgatgaaataattcagtgtgacaattgtggcattacagtccatgaagtgagacggtttaagcggaagcatcttactgccattgactgcca

SEQ ID NO: 886480 - DNA, 98 bp, Homo sapiens
agttctccagcatctccagggcagaaagcttaggtattgttgcagcatctggcagtgagactgaggatgaggacagcatggacattcccttggacctt

SEQ ID NO: 886481 - DNA, 99 bp, Homo sapiens
gatgtcttccagactcggtgctgtacccgccggtgctccgaggacacatgggcccagcacctttgacctgcagatgaagtttgtatgtggccagtgctg

SEQ ID NO: 886482 - DNA, 99 bp, Homo sapiens
tcagagtttgcattgttaacaaggtggtccgtactgagaagaacagtttgaacaaccgattcttaccctggaatgaaattgagacagaggccatcctgt

SEQ ID NO: 886483 - DNA, 98 bp, Homo sapiens
agaaacaaaatgtcaacaaattgatgggctggactctgtgaagctgagcaggagcagatgcggaagatcctctaccagaaagagtctaattacaacag

SEQ ID NO: 886484 - DNA, 99 bp, Homo sapiens
gctggaggagctgaaagctgagaatggtgaaaggtgtagcagtcactcggcctacacccacagcatcgaccttgtgaacccagcgacctgactgccttg

SEQ ID NO: 886485 - DNA, 75 bp, Homo sapiens
ttttcctccacctaccttcccgaagctccatgaacctgcctccagacaaggcccggctcctgcggcagtatgaca

SEQ ID NO: 886486 - DNA, 99 bp, Homo sapiens
agtgatgtggaggaaaacaacttcgagggcagatgccctctggtggtcagaagatgctgtgctgtctcgttaggatgaatggattaaaatgtacttttc

SEQ ID NO: 886487 - DNA, 99 bp, Homo sapiens
gaaaggcaaaggcaaaggcggctcgggagattcagccgtgaagcaagtgcagatagatggcctttttgctggcctagacctgaactcttcagataatca

SEQ ID NO: 886488 - DNA, 99 bp, Homo sapiens
ctcagatgaaatggatttgcatcttgtaatgtgtttaacaaagccacgaataacctataatggtactccaaagattcaggtttactcacgtcatccagc

SEQ ID NO: 886489 - DNA, 98 bp, Homo sapiens
agcatcgtcctaggaatggatttctcctctaatgacagtgtttctaagacctcagagaaatttggaatctatagacccgcagtttacaatccggagga

SEQ ID NO: 886490 - DNA, 98 bp, Homo sapiens
aaagactctgggactcttggtgccaacagagttactctatttggagcaagaggtggtggtggccttcccccgaagaaatttggtaatcctggggagcg

SEQ ID NO: 886491 - DNA, 100 bp, Homo sapiens
atctggtttgggagcacaagcaagcccaggcagccaaagagaagaagaagaggaggaggaggaagaagccttttgtcatacatgatatggagacactgtg

SEQ ID NO: 886492 - DNA, 99 bp, Homo sapiens
tgtggttcaagaaccttgacaagctcatccggctggtaaatgcgcagcttgaggtcctacctggtgtcctccatgagaatcatacaagccccgctacag

SEQ ID NO: 886493 - DNA, 100 bp, Homo sapiens
cggacgcgcgagacaatgaggagattacggtctttggtcaaacaattagagagaggggaagcttcagtggtagatcttaagaagaatttggaatatgcag

SEQ ID NO: 886494 - DNA, 98 bp, Homo sapiens
ccaggccaacccagaaaggctttctttctgagatttcacttccctgtcaactcttcagctcgatgccatggacaatattaccaggcagaaccaattct

SEQ ID NO: 886495 - DNA, 98 bp, Homo sapiens
gagaaatcatccatgaaacgtaaacttccttttactattagcccatcaagaaatgaagaacgagattcagacacagccagtcgtctgggattgtattc

SEQ ID NO: 886496 - DNA, 75 bp, Homo sapiens
cagggatgataattgggcctccaagagggtggcactgaatcaacaagacaagcaactcaattgattaatgctttg

SEQ ID NO: 886497 - DNA, 98 bp, Homo sapiens
cagtggtctgatgatgagaacacagccacgcttacggaattgaagccattttttatgaaggaagttggcagtcactttgatgattttgtgaccaatct

SEQ ID NO: 886498 - DNA, 76 bp, Homo sapiens
gtttggctgcccaggctcgcctcgactccaaatggttgaaaacagatatacagacaaatatggtctctttagaagg

SEQ ID NO: 886499 - DNA, 100 bp, Homo sapiens
aaaaacctttgaaatctccattgggagaaaagatgaggttgaatctccagtgatctgtaaaatcttagatacagcagatgaaaatggacttctttctctc

SEQ ID NO: 886500 - DNA, 100 bp, Homo sapiens
ggtggccactggcggccgaggtagaggcagtggcgcttgagttggtcgggggcagcggcagccactatgagaagattataggaaaaacaccaagactaga

SEQ ID NO: 886501 - DNA, 99 bp, Homo sapiens
ttataaattatgatctacctaccaatcgtgaaaactatattcacaggttcaagattatctaagaagatttgaaagtataccagatatgcttgaattgga

SEQ ID NO: 886502 - DNA, 99 bp, Homo sapiens
cagccaaaacagttcattcatattcagcgaatggtcctcgtccgaagtgagaatgggcagttgttaatgattcctcagcaggccttggcccagatgcag

SEQ ID NO: 886503 - DNA, 76 bp, Homo sapiens
gctgaactgcagtgggagaggagaagagatgctggcgtgaagggacccaacatgagtgaagtttcctgcaagaaac

SEQ ID NO: 886504 - DNA, 99 bp, Homo sapiens
tttcacaaccttcaagaaattcgggatgaacgtgaagccagagaaaatgtgaagagagagcaagatgaggcctatcgcctttcacttgaggctgacaga

SEQ ID NO: 886505 - DNA, 98 bp, Homo sapiens
ccgcctgccctgaggagtccccgctgcttgattctggctgtgactcagtcactgacactgagcctgaggacgagaaggttgtttcctactcgaagcag

SEQ ID NO: 886506 - DNA, 76 bp, Homo sapiens
aagccatccttggatgatttgaaagaactaatgcctgatgttgggaggcagaagatgatgaaacacccgtggattt

SEQ ID NO: 886507 - DNA, 98 bp, Homo sapiens
ggctggcccagccaatcctggagctgctgttgcagcacttgttccccaaacaagtgctcctacattctgactattgcccagaagaaaagatgtttggt

SEQ ID NO: 886508 - DNA, 76 bp, Homo sapiens
ggaagatggaaggaaggagcgcagcggtatataatgtttacatggcagggaggcagctgtgttctaagcggtaccg

SEQ ID NO: 886509 - DNA, 98 bp, Homo sapiens
taagaagtactccagggaaacctcccagaaacacaactggttttgagaatccatcccttcttcactcagtccacgtaaaggttaggatggtagaaagt

SEQ ID NO: 886510 - DNA, 99 bp, Homo sapiens
aggaatatgatgaaccaatcttgaaacacctgcaggatattaaagtgaaattttctgaccctggacagcctatggtaaccatggagaaagagctgcgga

SEQ ID NO: 886511 - DNA, 100 bp, Homo sapiens
agggaggtttggcagatggagaacctgatcgaacttcgatcgtcagtatttaaacagatcacatcatgcgtgagtacaagctagtggtccttggttcagg

SEQ ID NO: 886512 - DNA, 98 bp, Homo sapiens
tcagagcccagcaactcgcccctgtacatctgtcggattgtttgtgctgaacgaactgtcctcttgcttcagaagccccttttgagtgtggtctctgg

SEQ ID NO: 886513 - DNA, 98 bp, Homo sapiens
ggagacgagaccagaggccgaactcgggttctgacaagatggccgggctgccccgcaggatcatcaaggttttgagcaaaattttggactgtgaagca

SEQ ID NO: 886514 - DNA, 100 bp, Homo sapiens
ctgtttcccacatcctgatgacgttctggaatcaccacaagacctaagtgtccgaagaagtcaagataatggattcatacccgattcacttctggaagat

SEQ ID NO: 886515 - DNA, 99 bp, Homo sapiens
agctctccaagactagtctcttccaaggaagatcttgcagataacatttttctggagattttatactctactgatcccaaattgaaagacgcacgagag

SEQ ID NO: 886516 - DNA, 100 bp, Homo sapiens
cagaaggggagacacattttatgttgtgtcatttcgaaggatttcctcctctgatgctcctcttcagcctttggtatcctctccttctctgcaagctgct

SEQ ID NO: 886517 - DNA, 98 bp, Homo sapiens
accacgcagaacgtcaacaccaagtgcatcaccatccccagataacgaaggaggcccaacttcattcaataaggagcctgacggatttatcccagacg

SEQ ID NO: 886518 - DNA, 99 bp, Homo sapiens
caacgtcaactattacaatcgcttgtacaaaggagagtttaaacagccaaaacagttcattcatattcagccacaggatgggacgtgctgctctatggg

SEQ ID NO: 886519 - DNA, 98 bp, Homo sapiens
aacaccacaataatccacagccaagatggccctgctgtggcaccagtgaccaacgggaacacaacggtgccacccctgaacgatgatctggacatctt

SEQ ID NO: 886520 - DNA, 99 bp, Homo sapiens
gtgggccagcaatcctcagacgcctcacttaggacaatttttgaaatcatgaatcctgtttatagtcctggatcttctggggttccctatgcaaatgcc

SEQ ID NO: 886521 - DNA, 99 bp, Homo sapiens
gttaaaccatgttaaggaggattttacagaggtctgcagatctccaggggagcccaccagcctagtcaacatggcctcggaagacattgccaagctggc

SEQ ID NO: 886522 - DNA, 98 bp, Homo sapiens
cacagtccttctgcagtccctcgtccagccacccccaggaaaccagctctaccactccctgctgtgtattgtgcttcagttcctcatccttcgactaa

SEQ ID NO: 886523 - DNA, 99 bp, Homo sapiens
aatcaggtgcagcattcagagaccgtcgaaagcggattccaaggaatccaggccaacagagattttgagaaacacattgaaggatctgttaacacttga

SEQ ID NO: 886524 - DNA, 100 bp, Homo sapiens
aaaattcagaaaagagcaacttggagctgtaaaggtttggaattcacccagttgcaggccgaatgcctggtcagcttaatgtgctgctggctgaggctgg

SEQ ID NO: 886525 - DNA, 76 bp, Homo sapiens
aatggcaaaagaagagataagaggcccattgccagtgatgctacaggacgaagaggaatggataaaaacattggcg

SEQ ID NO: 886526 - DNA, 98 bp, Homo sapiens
tcttaagtagtgatatttctcttttgtctgcccctattgtaagtgcagatggaacacaacagcggggatctgatgagcttctttcttctggcatcatt

SEQ ID NO: 886527 - DNA, 99 bp, Homo sapiens
ctcagcctcccaagcagctgggtctacagatactccatcttctaaaccaacactcctagccaatggtggtcatggagtagaagggagcgatactacagg

SEQ ID NO: 886528 - DNA, 100 bp, Homo sapiens
agggaagtctataagctttgcaacagaattacagagtatgatataacaattggtgtatatgatccctgtaacttagcccagtaccctggatggcctttga

SEQ ID NO: 886529 - DNA, 76 bp, Homo sapiens
atatcttggatggagtcagaataataatggcagataaggaggaggaggcccagcctcgtgatgaggaatagcaagg

SEQ ID NO: 886530 - DNA, 98 bp, Homo sapiens
gagaggggactgcaagcatccgggtcggctcctggccggagcaagatggctgagggcgagcggcagccgccgccagcttccccgggcgctgcctggac

SEQ ID NO: 886531 - DNA, 98 bp, Homo sapiens
tttgaaacacttcagcagcttgtacaacattactcaggaaaccacccctactcctaatcccccgactacagaagaggagaaaacggaatctaatcagg

SEQ ID NO: 886532 - DNA, 99 bp, Homo sapiens
tacaaactggaaaataaagattacagagaaaaaaccaacaccttcctgtgcagtcctgttggaatttaatttggactcatatcaagatgctctgaagaa

SEQ ID NO: 886533 - DNA, 99 bp, Homo sapiens
cgagtcgtatcaaggagaggaagaactagtttcccaaacagatgttaagacattcttggaagccttaccgccaatgttttcagttgcaccaagcttagc

SEQ ID NO: 886534 - DNA, 98 bp, Homo sapiens
gaattcagaaggatatcgacgtcgtgatccagaagtccagagctgaggactgcctgtttgcaggagagcacagaatggggattcaacacctcggcaat

SEQ ID NO: 886535 - DNA, 75 bp, Homo sapiens
cagacggccctccctcggggcgcgctcgcagacggaggtctctgaaagaagatgaatttggctgagatttgtgat

SEQ ID NO: 886536 - DNA, 98 bp, Homo sapiens
cgcgttctaggattcggcattgttctggaatcaccttcctcagatccagatgacgtgtactactgtggaataaagtacatcaaagatgatgtcatctt

SEQ ID NO: 886537 - DNA, 99 bp, Homo sapiens
ttcgggctgagctagcagtgagcaccttttggcccaatgaatatcaggtctcgctctgccacccaggctaggagtgcagtagagtgactacagttcaca

SEQ ID NO: 886538 - DNA, 76 bp, Homo sapiens
aatgattatgttcgtgtgactcagctttactgtgatggggtgggataaagctgcccaaagagacaatgaagaggaa

SEQ ID NO: 886539 - DNA, 98 bp, Homo sapiens
cgggagcagcggcggcggggggcagccgctcgcccggacccctcaggatcagtttgacaacttagaaaaacacacacagtggggaattgatattcttg

SEQ ID NO: 886540 - DNA, 98 bp, Homo sapiens
tacagccatttgaactgcctatgaattttccaggtattatagctgcaaatgtccttgtattctgtttatggagagtaccttctctgcagcggacaatg

SEQ ID NO: 886541 - DNA, 100 bp, Homo sapiens
ttttcattgttccactggacgctcatcagagggaagatctttttcctcaattgcctgattacatcaaccccagagccgtgcagctgggctcccttctcgt

SEQ ID NO: 886542 - DNA, 98 bp, Homo sapiens
aaaagtatgttgtaccttgtgacagaatatgccaaaaatggagaaatttttggttaaaggtgaaagtgaattttaatgactgtagttttgatttgaaa

SEQ ID NO: 886543 - DNA, 99 bp, Homo sapiens
gcgctccaagagctccagcctgagccggctcgaggtagacgttacatccaagaggaaataatccaggcaaggaagcacaagctgatcaagatgtgtagt

SEQ ID NO: 886544 - DNA, 99 bp, Homo sapiens
gagaagctgccccgggccgtaacgcttacgggtatcattgcccagtgcctaagatcttttatgttcagctcactgtaggaaataatgaattttttgggg

SEQ ID NO: 886545 - DNA, 100 bp, Homo sapiens
tacctggaacttcatcatcatctacttcacaggaattgccatttcaatcatcctcttccagtggtagcgtgtttgggtctggaaacactggaagaggggg

SEQ ID NO: 886546 - DNA, 98 bp, Homo sapiens
cccgacgggcatgccaagaagatgagaccgggggaggcgacgctaagttgctgatcgtggcgagttctgaggttggaggttggaaatgggttccgcag

SEQ ID NO: 886547 - DNA, 99 bp, Homo sapiens
cagttgcctgttattcctgtgactggtcctgtggctcagctctacagcttacctcctgaagatgctgcagttggagaagaaacttgaacgtgaacttga

SEQ ID NO: 886548 - DNA, 99 bp, Homo sapiens
aagattggagacctcggtctggcaaccctgaagcgggcttcttttgccaagagtgtgatagagttgacgggcgccgacctgaaggactgcgtcagcaac

SEQ ID NO: 886549 - DNA, 100 bp, Homo sapiens
tccaaatgcatcattcagatgcaaggcaactcgaccaggtaaccaggagccgacaacaactcctgacgcaatggttcagccttttactaccatcccattt

SEQ ID NO: 886550 - DNA, 99 bp, Homo sapiens
gtggcttaaactcttggcatttggctttgcctttctggacacagaagtatttgtgacagtgaaatcaaatacattgcccatctcgctgcagtctataag

SEQ ID NO: 886551 - DNA, 98 bp, Homo sapiens
atttctgaagaagtggctgtagggagcatagctgctacactgaagatgaagcaaggcccaatgacccaggcgaaatttaaaagcctgttgattcaaga

SEQ ID NO: 886552 - DNA, 98 bp, Homo sapiens
aaagctagacctgcagagtgaagaaagctggtaatagatgtctgacaaactaaagaaagacttgtgttacggccgttgctccagggagaactgcaaat

SEQ ID NO: 886553 - DNA, 99 bp, Homo sapiens
cggctgtccaggaacggggcccccctgctgcggcggctgcagtccagcctgcagtctcagcgaagctcacagcagtcgaccgtgtgtgagaagatcatg

SEQ ID NO: 886554 - DNA, 98 bp, Homo sapiens
tccaagattctggcaaagcttgaacgcttaaaacaacagaatgaagacttgaggcgaatggccgaatctctccgcttattccactaagctcaacaaat

SEQ ID NO: 886555 - DNA, 99 bp, Homo sapiens
accagtttataagtgctgttaaatatgtgctccctagatctttagcttctactcccactgctcctaccactccagcaacgccagataatgcatcacagg

SEQ ID NO: 886556 - DNA, 99 bp, Homo sapiens
ctcgaccaacttacctttgggagaagttagacaataccctcaaactacctccaacagctactcagggtttctgatactgtccttcctgaaatgaagagc

SEQ ID NO: 886557 - DNA, 76 bp, Homo sapiens
aagaactgctgggaggatgacattgctctaggtcgtaaccagcctttgaaaaaggagaaaccaaaatggaaaagcg

SEQ ID NO: 886558 - DNA, 99 bp, Homo sapiens
tgctgttgtagcacagatttatgtaatgtcaactttactgagaattttccacctcctgacacaacaccactcagtgcccgggaagaacccaccgtccag

SEQ ID NO: 886559 - DNA, 76 bp, Homo sapiens
acgctcgacttcatgctcggcgccaaagatgacgtccggttgtttgccttcgtgcgcttcaccaccggggatgcca

SEQ ID NO: 886560 - DNA, 100 bp, Homo sapiens
cggatgaagagtcacacacacccctcccaccacctatgaagatttttgacaacgaccctacacaggatgaaatgctccagtattactgaaaaagatccaa

SEQ ID NO: 886561 - DNA, 98 bp, Homo sapiens
gggacctgtgccaggcagacaaggctcatccacctgcagacatggggcgcagaaagtcaaaacgaaagccgcctcccaagaagaagatgacaggcacc

SEQ ID NO: 886562 - DNA, 98 bp, Homo sapiens
tgagactcctgctcagtgtagcattaaggcttctagtgaggacgttgccagctccccggagcgccactacacgcccttgccttctgcttccagggaac

SEQ ID NO: 886563 - DNA, 99 bp, Homo sapiens
ctgcccccaacttcaaagccacagctgttatgccagatggtcagtttaaagatatcagcctgtctgactacaaaggtcattaagaaggcaaatgatacc

SEQ ID NO: 886564 - DNA, 98 bp, Homo sapiens
gcggaagaggcgtctgtgtcgcagcttggtctcagaggagcatcgctgggtttgcattgagactccttgcattccgccagatacacaaagttctaggc

SEQ ID NO: 886565 - DNA, 99 bp, Homo sapiens
tcaggacttgagtaacagcaacatggttcaccggaacagcacaatccgccctggctgtgatgtgaatccctcctgcgcactgtgtggttcaggcagcat

SEQ ID NO: 886566 - DNA, 98 bp, Homo sapiens
gggaacgaaagagaagctctatctcccctccaggagcccagctatgaactccttctccacaatacgagctcaactggaggcagtcctgtgcggaaatc

SEQ ID NO: 886567 - DNA, 98 bp, Homo sapiens
gcctgtgccggcacggctacaccatggagcgcccggataaggcggcgctgaacgcactgcagcctcctgagttcagacttgtgtatgcggatacctgc

SEQ ID NO: 886568 - DNA, 99 bp, Homo sapiens
aaaaaacctacacctgtgctattaccacagtcaaagcaacagaaacaaaagcaggcaaatggagtcgttgggaatgattccttagcaaaatcaccttct

SEQ ID NO: 886569 - DNA, 75 bp, Homo sapiens
ccatgaggccaaaggcagttgtattgaggcaggagaggcaggtccgagaccgcggggtgacccggtccaaggcgg

SEQ ID NO: 886570 - DNA, 99 bp, Homo sapiens
tcagagatccaagtgcgcgccctggcgggtccggaccaagggcgtctctggccgagcctctttttgtggaaaacgacagcagcagcagtggcctggaag

SEQ ID NO: 886571 - DNA, 98 bp, Homo sapiens
ttggcgaagccttgggtttctttcttaaaggactgatttttagaactccacatttgaggagctccgagttgccacccaggaaaaagagggctcctctg

SEQ ID NO: 886572 - DNA, 99 bp, Homo sapiens; identical to SEQ ID NO: 877855

SEQ ID NO: 886573 - DNA, 76 bp, Homo sapiens
cttcataattggagaaacaccaaaaggaatccgcaggtcctatcagcagtatcctggtgaataaatatggaagtcg

SEQ ID NO: 886574 - DNA, 40 bp, Homo sapiens
gagcagcgtcatgtacccctgtttctgtgtggagacagta

SEQ ID NO: 886575 - DNA, 40 bp, Homo sapiens
aacagatacgtgctaataaggtttctgtgtggagacagta

SEQ ID NO: 886576 - DNA, 40 bp, Homo sapiens
aacagatacgtgctaataaggtgccagaagcccaggaagc

SEQ ID NO: 886577 - DNA, 40 bp, Homo sapiens
gagcagcgtcatgtacccctagctatcagcttcccagttt

SEQ ID NO: 886578 - DNA, 40 bp, Homo sapiens
aacagatacgtgctaataagagctatcagcttcccagttt

SEQ ID NO: 886579 - DNA, 40 bp, Homo sapiens
tcgttcctctttccaagaagtcgttcctctttccaagaag
